(19) United States
(12) Patent Application Publication
(10) Pub. No.: US 2024/0252683 A1
(43) Pub. Date: Aug. 1, 2024

(54) Precise Excisions of Portions of Exon 51 for Treatment of Duchenne Muscular Dystrophy

(71) Applicant: Vertex Pharmaceuticals Incorporated, Boston, MA (US)

(72) Inventors: Tudor Fulga, Boston, MA (US); Yurong Xin, Boston, MA (US); Yi-Li Min, Boston, MA (US); Jianming Liu, Boston, MA (US); Mehmet Fatih Bolukbasi, Arlington, MA (US)

(73) Assignee: Vertex Pharmaceuticals Incorporated, Boston, MA (US)

(21) Appl. No.: 18/598,647

(22) Filed: Mar. 7, 2024

Related U.S. Application Data
(63) Continuation of application No. PCT/US22/76068, filed on Sep. 7, 2022.
(60) Provisional application No. 63/317,816, filed on Mar. 8, 2022.

(30) Foreign Application Priority Data
Sep. 8, 2021 (WO) PCT/US2021/049468

(51) Int. Cl. A61K 48/00; A61P 21/00; C12N 9/22; C12N 15/11; C12N 15/86

(52) U.S. Cl. CPC A61K 48/005; A61P 21/00; C12N 9/22; C12N 15/111; C12N 15/86; C12N 2310/20; C12N 2320/33; C12N 2750/14143

(57) ABSTRACT

Compositions and methods for treating Duchenne Muscular Dystrophy (DMD) and excising small portions of exon 51 of the DMD gene are encompassed.

[0001] This application is a bypass continuation of PCT/US2022/076068, filed on Sep. 7, 2022, which claims the benefit of priority to U.S. Provisional Application No. 63/317,816, filed Mar. 8, 2022; and PCT/US2021/049468, filed Sep. 8, 2021; all of which are incorporated by reference in their entirety.

[0002] The instant application contains a Sequence Listing which has been submitted electronically in XML format and is hereby incorporated by reference in its entirety. Said XML copy, created on Sep. 23, 2022, is named 01245-0036-OOPCT and is 2,006,939 bytes in size.

### INTRODUCTION AND SUMMARY

[0003] Muscular dystrophies (MD) are a group of more than 30 genetic diseases characterized by progressive weakness and degeneration of the skeletal muscles that control movement. Duchenne muscular dystrophy (DMD) is one of the most severe forms of MD that affects approximately 1 in 5000 boys and is characterized by progressive muscle weakness and premature death. Cardiomyopathy and heart failure are common, incurable and lethal features of DMD. The disease is caused by mutations in the gene encoding dystrophin (DMD), which result in loss of expression of dystrophin, causing muscle membrane fragility and progressive muscle wasting.

[0004] CRISPR-based genome editing can provide sequence-specific cleavage of genomic DNA using a Cas9 and a guide RNA. For example, a nucleic acid encoding the Cas9 enzyme and a nucleic acid encoding for the appropriate guide RNA can be provided on separate vectors or together on a single vector and administered in vivo or in vitro to knockout or correct a genetic mutation, for example. The approximately 20 nucleotides at the 5′ end of the guide RNA serves as the guide or spacer sequence that can be any sequence complementary to one strand of a genomic target location that has an adjacent protospacer adjacent motif (PAM). The PAM sequence is a short sequence adjacent to the Cas9 nuclease cut site that the Cas9 molecule requires for appropriate binding. The nucleotides 3′ of the guide or spacer sequence of the guide RNA serve as a scaffold sequence for interacting with Cas9. When a guide RNA and a Cas9 are expressed, the guide RNA will bind to Cas9 and direct it to the sequence complementary to the guide sequence, where it will then initiate a double-stranded break (DSB). To repair these breaks, cells typically use an error prone mechanism of non-homologous end joining (NHEJ) which can lead to disruption of function in the target gene through insertions or deletion of codons, shifts in the reading frame, or result in a premature stop codon triggering nonsense-mediated decay. See, e.g., Kumar et al. (2018) Front. Mol. Neurosci. Vol. 11, Article 413.

[0005] While gene editing strategies using systems (e.g., CRISPR) for treating DMD have been previously explored, these strategies have focused primarily on either: a) cutting at multiple different sites to excise large portions (e.g., one or more exons) ofthe dystrophin gene (see, e.g., Ousterout et al., 2015, Nat Commun. 6:6244); or b) cutting in a single site to introduce indels that either result in a frame-shifting mutation and/or that destroy a splice acceptor/donor site in the dystrophin gene (see, e.g., Amoassi et al., 2018, Science, 362(6410):86-91). However, there remains a need for additional alternative and effective gene editing strategies for treating diseases like DMD.

[0006] Provided herein are compositions and methods for treating DMD utilizing Cas proteins such as Staphylococcus aureus (SaCas9) and Staphylococcus lugdunensis (SluCas9). In some embodiments, pairs of guide RNAs that excise small portions of the DMD gene are provided, where the nucleic acid encoding the pairs of guide RNAs may be on a single nucleic acid molecule.

[0007] Accordingly, the following non-limiting embodiments are provided.
[0008] Embodiment 1 is a composition comprising one or more guide RNAs or a nucleic acid encoding one or more guide RNAs, wherein the guide RNAs comprise i) a guide sequence of Table 2; ii) at least 17, 18, 19, or 20 contiguous nucleotides of a guide sequence of Table 2; iii) a guide sequence that is at least 90% identical to a guide sequence of Table 2; or iv) any one of the guide sequence pairs shown in Tables 1B, and 1D, optionally further comprising a SaCas9 or a nucleic acid encoding a SaCas9 (for SEQ ID NOs: 11-15 or 27-69) or a SluCas9 or a nucleic acid encoding a SluCas9 (for SEQ ID NOs 243-269).
[0009] Embodiment 2 is a composition comprising a pair of guide RNAs or a nucleic acid encoding a pair of guide RNAs, wherein the pair of guide RNAs comprise a first and a second guide sequence, wherein the pair of guide sequences are selected from any of the following pairs:
   [0010] a. SEQ ID NOs: 11 and 12; 11 and 13; 11 and 14; 11 and 15; 12 and 13; 12 and 14; 12 and 15; 13 and 14; 13 and 15; 14 and 15; 27 and 28; 27 and 29; 27 and 30; 27 and 31; 27 and 32; 27 and 33; 27 and 34; 27 and 35; 27 and 36; 27 and 37; 27 and 38; 27 and 39; 27 and 40; 27 and 41; 27 and 42; 27 and 43; 27 and 44; 27 and 45; 27 and 46; 27 and 47; 27 and 48; 27 and 53; 27 and 54; 27 and 55; 27 and 56; 27 and 57; 27 and 58; 27 and 59; 27 and 60; 27 and 61; 27 and 62; 27 and 63; 27 and 64; 27 and 65; 27 and 66; 27 and 67; 27 and 68; 27 and 69; 28 and 29; 28 and 30; 28 and 31; 28 and 32; 28 and 33; 28 and 34; 28 and 35; 28 and 36; 28 and 37; 28 and 38; 28 and 39; 28 and 40; 28 and 41; 28 and 42; 28 and 43; 28 and 44; 28 and 45; 28 and 46; 28 and 47; 28 and 48; 28 and 53; 28 and 54; 28 and 55; 28 and 56; 28 and 57; 28 and 58; 28 and 59; 28 and 60; 28 and 61; 28 and 62; 28 and 63; 28 and 64; 28 and 65; 28 and 66; 28 and 67; 28 and 68; 28 and 69; 29 and 30; 29 and 31; 29 and 32; 29 and 33; 29 and 34; 29 and 35; 29 and 36; 29 and 37; 29 and 38; 29 and 39; 29 and 40; 29 and 41; 29 and 42; 29 and 43; 29 and 44; 29 and 45; 29 and 46; 29 and 47; 29 and 48; 29 and 53; 29 and 54; 29 and 55; 29 and 56; 29 and 57; 29 and 58; 29 and 59; 29 and 60; 29 and 61; 29 and 62; 29 and 63; 29 and 64; 29 and 65; 29 and 66; 29 and 67; 29 and 68; 29 and 69; 30 and 31; 30 and 32; 30 and 33; 30 and 34; 30 and 35; 30 and 36; 30 and 37; 30 and 38; 30 and 39; 30 and 40; 30 and 41; 30 and 42; 30 and 43; 30 and 44; 30 and 45; 30 and 46; 30 and 47; 30 and 48; 30 and 53; 30 and 54; 30 and 55; 30 and 56; 30 and 57; 30 and 58; 30 and 59; 30 and 60; 30 and 61; 30 and 62; 30 and 63; 30 and 64; 30 and 65; 30 and 66; 30 and 67; 30 and 68; 30 and 69; 31 and 32; 31 and 33; 31 and 34; 31 and 35; 31 and 36; 31 and 37; 31 and 38; 31 and 39; 31 and 40; 31 and 41; 31 and 42; 31 and 43; 31 and 44; 31 and 45; 31 and 46; 31 and 47; 31 and 48; 31 and 53; 31 and 54; 31 and 55; 31 and 56; 31 and 57; 31 and 58; 31 and 59; 31 and 60; 31 and 61; 31 and 62; 31 and 63; 31 and 64; 31 and 65; 31 and 66; 31 and 67; 31 and 68; 31 and 69; 32 and 33; 32 and 34; 32 and 35; 32 and 36; 32 and 37; 32 and 38; 32 and 39; 32 and 40; 32 and 41; 32 and 42; 32 and 43; 32 and 44; 32 and 45; 32 and 46; 32 and 47; 32 and 48; 32 and 53; 32 and 54; 32 and 55; 32 and 56; 32 and 57; 32 and 58; 32 and 59; 32 and 60; 32 and 61; 32 and 62; 32 and 63; 32 and 64; 32 and 65; 32 and 66; 32 and 67; 32 and 68; 32 and 69; 33 and 34; 33 and 35; 33 and 36; 33 and 37; 33 and 38; 33 and 39; 33 and 40; 33 and 41; 33 and 42; 33 and 43; 33 and 44; 33 and 45; 33 and 46; 33 and 47; 33 and 48; 33 and 53; 33 and 54; 33 and 55; 33 and 56; 33 and 57; 33 and 58; 33 and 59; 33 and 60; 33 and 61; 33 and 62; 33 and 63; 33 and 64; 33 and 65; 33 and 66; 33 and 67; 33 and 68; 33 and 69; 34 and 35; 34 and 36; 34 and 37; 34 and 38; 34 and 39; 34 and 40; 34 and 41; 34 and 42; 34 and 43; 34 and 44; 34 and 45; 34 and 46; 34 and 47; 34 and 48; 34 and 53; 34 and 54; 34 and 55; 34 and 56; 34 and 57; 34 and 58; 34 and 59; 34 and 60; 34 and 61; 34 and 62; 34 and 63; 34 and 64; 34 and 65; 34 and 66; 34 and 67; 34 and 68; 34 and 69; 35 and 36; 35 and 37; 35 and 38; 35 and 39; 35 and 40; 35 and 41; 35 and 42; 35 and 43; 35 and 44; 35 and 45; 35 and 46; 35 and 47; 35 and 48; 35 and 53; 35 and 54; 35 and 55; 35 and 56; 35 and 57; 35 and 58; 35 and 59; 35 and 60; 35 and 61; 35 and 62; 35 and 63; 35 and 64; 35 and 65; 35 and 66; 35 and 67; 35 and 68; 35 and 69; 36 and 37; 36 and 38; 36 and 39; 36 and 40; 36 and 41; 36 and 42; 36 and 43; 36 and 44; 36 and 45; 36 and 46; 36 and 47; 36 and 48; 36 and 53; 36 and 54; 36 and 55; 36 and 56; 36 and 57; 36 and 58; 36 and 59; 36 and 60; 36 and 61; 36 and 62; 36 and 63; 36 and 64; 36 and 65; 36 and 66; 36 and 67; 36 and 68; 36 and 69; 37 and 38; 37 and 39; 37 and 40; 37 and 41; 37 and 42; 37 and 43; 37 and 44; 37 and 45; 37 and 46; 37 and 47; 37 and 48; 37 and 53; 37 and 54; 37 and 55; 37 and 56; 37 and 57; 37 and 58; 37 and 59; 37 and 60; 37 and 61; 37 and 62; 37 and 63; 37 and 64; 37 and 65; 37 and 66; 37 and 67; 37 and 68; 37 and 69; 38 and 39; 38 and 40; 38 and 41; 38 and 42; 38 and 43; 38 and 44; 38 and 45; 38 and 46; 38 and 47; 38 and 48; 38 and 53; 38 and 54; 38 and 55; 38 and 56; 38 and 57; 38 and 58; 38 and 59; 38 and 60; 38 and 61; 38 and 62; 38 and 63; 38 and 64; 38 and 65; 38 and 66; 38 and 67; 38 and 68; 38 and 69; 39 and 40; 39 and 41; 39 and 42; 39 and 43; 39 and 44; 39 and 45; 39 and 46; 39 and 47; 39 and 48; 39 and 53; 39 and 54; 39 and 55; 39 and 56; 39 and 57; 39 and 58; 39 and 59; 39 and 60; 39 and 61; 39 and 62; 39 and 63; 39 and 64; 39 and 65; 39 and 66; 39 and 67; 39 and 68; 39 and 69; 40 and 41; 40 and 42; 40 and 43; 40 and 44; 40 and 45; 40 and 46; 40 and 47; 40 and 48; 40 and 53; 40 and 54; 40 and 55; 40 and 56; 40 and 57; 40 and 58; 40 and 59; 40 and 60; 40 and 61; 40 and 62; 40 and 63; 40 and 64; 40 and 65; 40 and 66; 40 and 67; 40 and 68; 40 and 69; 41 and 42; 41 and 43; 41 and 44; 41 and 45; 41 and 46; 41 and 47; 41 and 48; 41 and 53; 41 and 54; 41 and 55; 41 and 56; 41 and 57; 41 and 58; 41 and 59; 41 and 60; 41 and 61; 41 and 62; 41 and 63; 41 and 64; 41 and 65; 41 and 66; 41 and 67; 41 and 68; 41 and 69; 42 and 43; 42 and 44; 42 and 45; 42 and 46; 42 and 47; 42 and 48; 42 and 53; 42 and 54; 42 and 55; 42 and 56; 42 and 57; 42 and 58; 42 and 59; 42 and 60; 42 and 61; 42 and 62; 42 and 63; 42 and 64; 42 and 65; 42 and 66; 42 and 67; 42 and 68; 42 and 69; 43 and 44; 43 and 45; 43 and 46; 43 and 47; 43 and 48; 43 and 53; 43 and 54; 43 and 55; 43 and 56; 43 and 57; 43 and 58; 43 and 59; 43 and 60; 43 and 61; 43 and 62; 43 and 63; 43 and 64; 43 and 65; 43 and 66; 43 and 67; 43 and 68; 43 and 69; 44 and 45; 44 and 46; 44 and 47; 44 and 48; 44 and 53; 44 and 54; 44 and 55; 44 and 56; 44 and 57; 44 and 58; 44 and 59; 44 and 60; 44 and 61; 44 and 62; 44 and 63; 44 and 64; 44 and 65; 44 and 66; 44 and 67; 44 and 68; 44 and 69; 45 and 46; 45 and 47; 45 and 48; 45 and 53; 45 and 54; 45 and 55; 45 and 56; 45 and 57; 45 and 58; 45 and 59; 45 and 60; 45 and 61; 45 and 62; 45 and 63; 45 and 64; 45 and 65; 45 and 66; 45 and 67; 45 and 68; 45 and 69; 46 and 47; 46 and 48; 46 and 53; 46 and 54; 46 and 55; 46 and 56; 46 and 57; 46 and 58; 46 and 59; 46 and 60; 46 and 61; 46 and 62; 46 and 63; 46 and 64; 46 and 65; 46 and 66; 46 and 67; 46 and 68; 46 and 69; 47 and 48; 47 and 53; 47 and 54; 47 and 55; 47 and 56; 47 and 57; 47 and 58; 47 and 59; 47 and 60; 47 and 61; 47 and 62; 47 and 63; 47 and 64; 47 and 65; 47 and 66; 47 and 67; 47 and 68; 47 and 69; 48 and 53; 48 and 54; 48 and 55; 48 and 56; 48 and 57; 48 and 58; 48 and 59; 48 and 60; 48 and 61; 48 and 62; 48 and 63; 48 and 64; 48 and 65; 48 and 66; 48 and 67; 48 and 68; 48 and 69; 53 and 54; 53 and 55; 53 and 56; 53 and 57; 53 and 58; 53 and 59; 53 and 60; 53 and 61; 53 and 62; 53 and 63; 53 and 64; 53 and 65; 53 and 66; 53 and 67; 53 and 68; 53 and 69; 54 and 55; 54 and 56; 54 and 57; 54 and 58; 54 and 59; 54 and 60; 54 and 61; 54 and 62; 54 and 63; 54 and 64; 54 and 65; 54 and 66; 54 and 67; 54 and 68; 54 and 69; 55 and 56; 55 and 57; 55 and 58; 55 and 59; 55 and 60; 55 and 61; 55 and 62; 55 and 63; 55 and 64; 55 and 65; 55 and 66; 55 and 67; 55 and 68; 55 and 69; 56 and 57; 56 and 58; 56 and 59; 56 and 60; 56 and 61; 56 and 62; 56 and 63; 56 and 64; 56 and 65; 56 and 66; 56 and 67; 56 and 68; 56 and 69; 57 and 58; 57 and 59; 57 and 60; 57 and 61; 57 and 62; 57 and 63; 57 and 64; 57 and 65; 57 and 66; 57 and 67; 57 and 68; 57 and 69; 58 and 59; 58 and 60; 58 and 61; 58 and 62; 58 and 63; 58 and 64; 58 and 65; 58 and 66; 58 and 67; 58 and 68; 58 and 69; 59 and 60; 59 and 61; 59 and 62; 59 and 63; 59 and 64; 59 and 65; 59 and 66; 59 and 67; 59 and 68; 59 and 69; 60 and 61; 60 and 62; 60 and 63; 60 and 64; 60 and 65; 60 and 66; 60 and 67; 60 and 68; 60 and 69; 61 and 62; 61 and 63; 61 and 64; 61 and 65; 61 and 66; 61 and 67; 61 and 68; 61 and 69; 62 and 63; 62 and 64; 62 and 65; 62 and 66; 62 and 67; 62 and 68; 62 and 69; 63 and 64; 63 and 65; 63 and 66; 63 and 67; 63 and 68; 63 and 69; 64 and 65; 64 and 66; 64 and 67; 64 and 68; 64 and 69; 65 and 66; 65 and 67; 65 and 68; 65 and 69; 66 and 67; 66 and 68; 66 and 69; 67 and 68; 67 and 69; or 68 and 69;
   [0011] b. SEQ ID NOs: 243 and 244; 243 and 245; 243 and 246; 243 and 247; 243 and 248; 243 and 249; 243 and 250; 243 and 251; 243 and 252; 243 and 253; 243 and 254; 243 and 255; 243 and 256; 243 and 257; 243 and 258; 243 and 259; 243 and 260; 243 and 261; 243 and 262; 243 and 263; 243 and 264; 243 and 265; 243 and 266; 243 and 267; 243 and 268; 243 and 269; 244 and 245; 244 and 246; 244 and 247; 244 and 248; 244 and 249; 244 and 250; 244 and 251; 244 and 252; 244 and 253; 244 and 254; 244 and 255; 244 and 256; 244 and 257; 244 and 258; 244 and 259; 244 and 260; 244 and 261; 244 and 262; 244 and 263; 244 and 264; 244 and 265; 244 and 266; 244 and 267; 244 and 268; 244 and 269; 245 and 246; 245 and 247; 245 and 248; 245 and 249; 245 and 250; 245 and 251; 245 and 252; 245 and 253; 245 and 254; 245 and 255; 245 and 256; 245 and 257; 245 and 258; 245 and 259; 245 and 260; 245 and 261; 245 and 262; 245 and 263; 245 and 264; 245 and 265; 245 and 266; 245 and 267; 245 and 268; 245 and 269; 246 and 247; 246 and 248; 246 and 249; 246 and 250; 246 and 251; 246 and 252; 246 and 253; 246 and 254; 246 and 255; 246 and 256; 246 and 257; 246 and 258; 246 and 259; 246 and 260; 246 and 261; 246 and 262; 246 and 263; 246 and 264; 246 and 265; 246 and 266; 246 and 267; 246 and 268; 246 and 269; 247 and 248; 247 and 249; 247 and 250; 247 and 251; 247 and 252; 247 and 253; 247 and 254; 247 and 255; 247 and 256; 247 and 257; 247 and 258; 247 and 259; 247 and 260; 247 and 261; 247 and 262; 247 and 263; 247 and 264; 247 and 265; 247 and 266; 247 and 267; 247 and 268; 247 and 269; 248 and 249; 248 and 250; 248 and 251; 248 and 252; 248 and 253; 248 and 254; 248 and 255; 248 and 256; 248 and 257; 248 and 258; 248 and 259; 248 and 260; 248 and 261; 248 and 262; 248 and 263; 248 and 264; 248 and 265; 248 and 266; 248 and 267; 248 and 268; 248 and 269; 249 and 250; 249 and 251; 249 and 252; 249 and 253; 249 and 254; 249 and 255; 249 and 256; 249 and 257; 249 and 258; 249 and 259; 249 and 260; 249 and 261; 249 and 262; 249 and 263; 249 and 264; 249 and 265; 249 and 266; 249 and 267; 249 and 268; 249 and 269; 250 and 251; 250 and 252; 250 and 253; 250 and 254; 250 and 255; 250 and 256; 250 and 257; 250 and 258; 250 and 259; 250 and 260; 250 and 261; 250 and 262; 250 and 263; 250 and 264; 250 and 265; 250 and 266; 250 and 267; 250 and 268; 250 and 269; 251 and 252; 251 and 253; 251 and 254; 251 and 255; 251 and 256; 251 and 257; 251 and 258; 251 and 259; 251 and 260; 251 and 261; 251 and 262; 251 and 263; 251 and 264; 251 and 265; 251 and 266; 251 and 267; 251 and 268; 251 and 269; 252 and 253; 252 and 254; 252 and 255; 252 and 256; 252 and 257; 252 and 258; 252 and 259; 252 and 260; 252 and 261; 252 and 262; 252 and 263; 252 and 264; 252 and 265; 252 and 266; 252 and 267; 252 and 268; 252 and 269; 253 and 254; 253 and 255; 253 and 256; 253 and 257; 253 and 258; 253 and 259; 253 and 260; 253 and 261; 253 and 262; 253 and 263; 253 and 264; 253 and 265; 253 and 266; 253 and 267; 253 and 268; 253 and 269; 254 and 255; 254 and 256; 254 and 257; 254 and 258; 254 and 259; 254 and 260; 254 and 261; 254 and 262; 254 and 263; 254 and 264; 254 and 265; 254 and 266; 254 and 267; 254 and 268; 254 and 269; 255 and 256; 255 and 257; 255 and 258; 255 and 259; 255 and 260; 255 and 261; 255 and 262; 255 and 263; 255 and 264; 255 and 265; 255 and 266; 255 and 267; 255 and 268; 255 and 269; 256 and 257; 256 and 258; 256 and 259; 256 and 260; 256 and 261; 256 and 262; 256 and 263; 256 and 264; 256 and 265; 256 and 266; 256 and 267; 256 and 268; 256 and 269; 257 and 258; 257 and 259; 257 and 260; 257 and 261; 257 and 262; 257 and 263; 257 and 264; 257 and 265; 257 and 266; 257 and 267; 257 and 268; 257 and 269; 258 and 259; 258 and 260; 258 and 261; 258 and 262; 258 and 263; 258 and 264; 258 and 265; 258 and 266; 258 and 267; 258 and 268; 258 and 269; 259 and 260; 259 and 261; 259 and 262; 259 and 263; 259 and 264; 259 and 265; 259 and 266; 259 and 267; 259 and 268; 259 and 269; 260 and 261; 260 and 262; 260 and 263; 260 and 264; 260 and 265; 260 and 266; 260 and 267; 260 and 268; 260 and 269; 261 and 262; 261 and 263; 261 and 264; 261 and 265; 261 and 266; 261 and 267; 261 and 268; 261 and 269; 262 and 263; 262 and 264; 262 and 265; 262 and 266; 262 and 267; 262 and 268; 262 and 269; 263 and 264; 263 and 265; 263 and 266; 263 and 267; 263 and 268; 263 and 269; 264 and 265; 264 and 266; 264 and 267; 264 and 268; 264 and 269; 265 and 266; 265 and 267; 265 and 268; 265 and 269; 266 and 267; 266 and 268; 266 and 269; 267 and 268; 267 and 269; or 268 and 269;
[0012] c. SEQ ID NOs: 28 and 57; 31 and 57; 31 and 46; 32 and 69; 33 and 57; 33 and 69; 34 and 57; 36 and 69; 37 and 69; 37 and 46; 39 and 46; 40 and 46; 46 and 35; 46 and 62; 46 and 65; 46 and 67; 47 and 57; 48 and 57; 49 and 57; 51 and 57; 53 and 46; 54 and 46; 55 and 46; 58 and 46; 59 and 46; 60 and 46; 61 and 69; or 69 and 30;
   [0013] d. SEQ ID NOs: 243 and 252; 245 and 252; 252 and 253; 252 and 254; 252 and 256; 252 and 257; 252 and 258; 252 and 262; 252 and 264; 252 and 265; or 252 and 266; and
   [0014] e. SEQ ID NOs: 269 and 247; 252 and 254; 269 and 249; 252 and 262; or 252 and 264.
[0015] Embodiment 3 is a composition comprising: one or more nucleic acid molecules encoding
   [0016] a. a SaCas9 or SluCas9; and
   [0017] b. a pair of guide sequences, wherein the pair of guide sequences is selected from the guide sequence pairs of SEQ ID NO: 11 and SEQ ID NO: 12; SEQ ID NO: 11 and SEQ ID NO: 13; SEQ ID NO: 11 and SEQ ID NO: 14; SEQ ID NO: 11 and SEQ ID NO: 15; SEQ ID NO: 12 and SEQ ID NO: 13; SEQ ID NO: 12 and SEQ ID NO: 14; SEQ ID NO: 12 and SEQ ID NO: 15; SEQ ID NO: 13 and SEQ ID NO: 14; SEQ ID NO: 13 and SEQ ID NO: 15; SEQ ID NO: 14 and SEQ ID NO: 15; SEQ ID NO: 27 and SEQ ID NO: 28; SEQ ID NO: 27 and SEQ ID NO: 29; SEQ ID NO: 27 and SEQ ID NO: 30; SEQ ID NO: 27 and SEQ ID NO: 31; SEQ ID NO: 27 and SEQ ID NO: 32; SEQ ID NO: 27 and SEQ ID NO: 33; SEQ ID NO: 27 and SEQ ID NO: 34; SEQ ID NO: 27 and SEQ ID NO: 35; SEQ ID NO: 27 and SEQ ID NO: 36; SEQ ID NO: 27 and SEQ ID NO: 37; SEQ ID NO: 27 and SEQ ID NO: 38; SEQ ID NO: 27 and SEQ ID NO: 39; SEQ ID NO: 27 and SEQ ID NO: 40; SEQ ID NO: 27 and SEQ ID NO: 41; SEQ ID NO: 27 and SEQ ID NO: 42; SEQ ID NO: 27 and SEQ ID NO: 43; SEQ ID NO: 27 and SEQ ID NO: 44; SEQ ID NO: 27 and SEQ ID NO: 45; SEQ ID NO: 27 and SEQ ID NO: 46; SEQ ID NO: 27 and SEQ ID NO: 47; SEQ ID NO: 27 and SEQ ID NO: 48; SEQ ID NO: 27 and SEQ ID NO: 53; SEQ ID NO: 27 and SEQ ID NO: 54; SEQ ID NO: 27 and SEQ ID NO: 55; SEQ ID NO: 27 and SEQ ID NO: 56; SEQ ID NO: 27 and SEQ ID NO: 57; SEQ ID NO: 27 and SEQ ID NO: 58; SEQ ID NO: 27 and SEQ ID NO: 59; SEQ ID NO: 27 and SEQ ID NO: 60; SEQ ID NO: 27 and SEQ ID NO: 61; SEQ ID NO: 27 and SEQ ID NO: 62; SEQ ID NO: 27 and SEQ ID NO: 63; SEQ ID NO: 27 and SEQ ID NO: 64; SEQ ID NO: 27 and SEQ ID NO: 65; SEQ ID NO: 27 and SEQ ID NO: 66; SEQ ID NO: 27 and SEQ ID NO: 67; SEQ ID NO: 27 and SEQ ID NO: 68; SEQ ID NO: 27 and SEQ ID NO: 69; SEQ ID NO: 28 and SEQ ID NO: 29; SEQ ID NO: 28 and SEQ ID NO: 30; SEQ ID NO: 28 and SEQ ID NO: 31; SEQ ID NO: 28 and SEQ ID NO: 32; SEQ ID NO: 28 and SEQ ID NO: 33; SEQ ID NO: 28 and SEQ ID NO: 34; SEQ ID NO: 28 and SEQ ID NO: 35; SEQ ID NO: 28 and SEQ ID NO: 36; SEQ ID NO: 28 and SEQ ID NO: 37; SEQ ID NO: 28 and SEQ ID NO: 38; SEQ ID NO: 28 and SEQ ID NO: 39; SEQ ID NO: 28 and SEQ ID NO: 40; SEQ ID NO: 28 and SEQ ID NO: 41; SEQ ID NO: 28 and SEQ ID NO: 42; SEQ ID NO: 28 and SEQ ID NO: 43; SEQ ID NO: 28 and SEQ ID NO: 44; SEQ ID NO: 28 and SEQ ID NO: 45; SEQ ID NO: 28 and SEQ ID NO: 46; SEQ ID NO: 28 and SEQ ID NO: 47; SEQ ID NO: 28 and SEQ ID NO: 48; SEQ ID NO: 28 and SEQ ID NO: 53; SEQ ID NO: 28 and SEQ ID NO: 54; SEQ ID NO: 28 and SEQ ID NO: 55; SEQ ID NO: 28 and SEQ ID NO: 56; SEQ ID NO: 28 and SEQ ID NO: 57; SEQ ID NO: 28 and SEQ ID NO: 58; SEQ ID NO: 28 and SEQ ID NO: 59; SEQ ID NO: 28 and SEQ ID NO: 60; SEQ ID NO: 28 and SEQ ID NO: 61; SEQ ID NO: 28 and SEQ ID NO: 62; SEQ ID NO: 28 and SEQ ID NO: 63; SEQ ID NO: 28 and SEQ ID NO: 64; SEQ ID NO: 28 and SEQ ID NO: 65; SEQ ID NO: 28 and SEQ ID NO: 66; SEQ ID NO: 28 and SEQ ID NO: 67; SEQ ID NO: 28 and SEQ ID NO: 68; SEQ ID NO: 28 and SEQ ID NO: 69; SEQ ID NO: 29 and SEQ ID NO: 30; SEQ ID NO: 29 and SEQ ID NO: 31; SEQ ID NO: 29 and SEQ ID NO: 32; SEQ ID NO: 29 and SEQ ID NO: 33; SEQ ID NO: 29 and SEQ ID NO: 34; SEQ ID NO: 29 and SEQ ID NO: 35; SEQ ID NO: 29 and SEQ ID NO: 36; SEQ ID NO: 29 and SEQ ID NO: 37; SEQ ID NO: 29 and SEQ ID NO: 38; SEQ ID NO: 29 and SEQ ID NO: 39; SEQ ID NO: 29 and SEQ ID NO: 40; SEQ ID NO: 29 and SEQ ID NO: 41; SEQ ID NO: 29 and SEQ ID NO: 42; SEQ ID NO: 29 and SEQ ID NO: 43; SEQ ID NO: 29 and SEQ ID NO: 44; SEQ ID NO: 29 and SEQ ID NO: 45; SEQ ID NO: 29 and SEQ ID NO: 46; SEQ ID NO: 29 and SEQ ID NO: 47; SEQ ID NO: 29 and SEQ ID NO: 48; SEQ ID NO: 29 and SEQ ID NO: 53; SEQ ID NO: 29 and SEQ ID NO: 54; SEQ ID NO: 29 and SEQ ID NO: 55; SEQ ID NO: 29 and SEQ ID NO: 56; SEQ ID NO: 29 and SEQ ID NO: 57; SEQ ID NO: 29 and SEQ ID NO: 58; SEQ ID NO: 29 and SEQ ID NO: 59; SEQ ID NO: 29 and SEQ ID NO: 60; SEQ ID NO: 29 and SEQ ID NO: 61; SEQ ID NO: 29 and SEQ ID NO: 62; SEQ ID NO: 29 and SEQ ID NO: 63; SEQ ID NO: 29 and SEQ ID NO: 64; SEQ ID NO: 29 and SEQ ID NO: 65; SEQ ID NO: 29 and SEQ ID NO: 66; SEQ ID NO: 29 and SEQ ID NO: 67; SEQ ID NO: 29 and SEQ ID NO: 68; SEQ ID NO: 29 and SEQ ID NO: 69; SEQ ID NO: 30 and SEQ ID NO: 31; SEQ ID NO: 30 and SEQ ID NO: 32; SEQ ID NO: 30 and SEQ ID NO: 33; SEQ ID NO: 30 and SEQ ID NO: 34; SEQ ID NO: 30 and SEQ ID NO: 35; SEQ ID NO: 30 and SEQ ID NO: 36; SEQ ID NO: 30 and SEQ ID NO: 37; SEQ ID NO: 30 and SEQ ID NO: 38; SEQ ID NO: 30 and SEQ ID NO: 39; SEQ ID NO: 30 and SEQ ID NO: 40; SEQ ID NO: 30 and SEQ ID NO: 41; SEQ ID NO: 30 and SEQ ID NO: 42; SEQ ID NO: 30 and SEQ ID NO: 43; SEQ ID NO: 30 and SEQ ID NO: 44; SEQ ID NO: 30 and SEQ ID NO: 45; SEQ ID NO: 30 and SEQ ID NO: 46; SEQ ID NO: 30 and SEQ ID NO: 47; SEQ ID NO: 30 and SEQ ID NO: 48; SEQ ID NO: 30 and SEQ ID NO: 53; SEQ ID NO: 30 and SEQ ID NO: 54; SEQ ID NO: 30 and SEQ ID NO: 55; SEQ ID NO: 30 and SEQ ID NO: 56; SEQ ID NO: 30 and SEQ ID NO: 57; SEQ ID NO: 30 and SEQ ID NO: 58; SEQ ID NO: 30 and SEQ ID NO: 59; SEQ ID NO: 30 and SEQ ID NO: 60; SEQ ID NO: 30 and SEQ ID NO: 61; SEQ ID NO: 30 and SEQ ID NO: 62; SEQ ID NO: 30 and SEQ ID NO: 63; SEQ ID NO: 30 and SEQ ID NO: 64; SEQ ID NO: 30 and SEQ ID NO: 65; SEQ ID NO: 30 and SEQ ID NO: 66; SEQ ID NO: 30 and SEQ ID NO: 67; SEQ ID NO: 30 and SEQ ID NO: 68; SEQ ID NO: 30 and SEQ ID NO: 69; SEQ ID NO: 31 and SEQ ID NO: 32; SEQ ID NO: 31 and SEQ ID NO: 33; SEQ ID NO: 31 and SEQ ID NO: 34; SEQ ID NO: 31 and SEQ ID NO: 35; SEQ ID NO: 31 and SEQ ID NO: 36; SEQ ID NO: 31 and SEQ ID NO: 37; SEQ ID NO: 31 and SEQ ID NO: 38; SEQ ID NO: 31 and SEQ ID NO: 39; SEQ ID NO: 31 and SEQ ID NO: 40; SEQ ID NO: 31 and SEQ ID NO: 41; SEQ ID NO: 31 and SEQ ID NO: 42; SEQ ID NO: 31 and SEQ ID NO: 43; SEQ ID NO: 31 and SEQ ID NO: 44; SEQ ID NO: 31 and SEQ ID NO: 45; SEQ ID NO: 31 and SEQ ID NO: 46; SEQ ID NO: 31 and SEQ ID NO: 47; SEQ ID NO: 31 and SEQ ID NO: 48; SEQ ID NO: 31 and SEQ ID NO: 53; SEQ ID NO: 31 and SEQ ID NO: 54; SEQ ID NO: 31 and SEQ ID NO: 55; SEQ ID NO: 31 and SEQ ID NO: 56; SEQ ID NO: 31 and SEQ ID NO: 57; SEQ ID NO: 31 and SEQ ID NO: 58; SEQ ID NO: 31 and SEQ ID NO: 59; SEQ ID NO: 31 and SEQ ID NO: 60; SEQ ID NO: 31 and SEQ ID NO: 61; SEQ ID NO: 31 and SEQ ID NO: 62; SEQ ID NO: 31 and SEQ ID NO: 63; SEQ ID NO: 31 and SEQ ID NO: 64; SEQ ID NO: 31 and SEQ ID NO: 65; SEQ ID NO: 31 and SEQ ID NO: 66; SEQ ID NO: 31 and SEQ ID NO: 67; SEQ ID NO: 31 and SEQ ID NO: 68; SEQ ID NO: 31 and SEQ ID NO: 69; SEQ ID NO: 32 and SEQ ID NO: 33; SEQ ID NO: 32 and SEQ ID NO: 34; SEQ ID NO: 32 and SEQ ID NO: 35; SEQ ID NO: 32 and SEQ ID NO: 36; SEQ ID NO: 32 and SEQ ID NO: 37; SEQ ID NO: 32 and SEQ ID NO: 38; SEQ ID NO: 32 and SEQ ID NO: 39; SEQ ID NO: 32 and SEQ ID NO: 40; SEQ ID NO: 32 and SEQ ID NO: 41; SEQ ID NO: 32 and SEQ ID NO: 42; SEQ ID NO: 32 and SEQ ID NO: 43; SEQ ID NO: 32 and SEQ ID NO: 44; SEQ ID NO: 32 and SEQ ID NO: 45; SEQ ID NO: 32 and SEQ ID NO: 46; SEQ ID NO: 32 and SEQ ID NO: 47; SEQ ID NO: 32 and SEQ ID NO: 48; SEQ ID NO: 32 and SEQ ID NO: 53; SEQ ID NO: 32 and SEQ ID NO: 54; SEQ ID NO: 32 and SEQ ID NO: 55; SEQ ID NO: 32 and SEQ ID NO: 56; SEQ ID NO: 32 and SEQ ID NO: 57; SEQ ID NO: 32 and SEQ ID NO: 58; SEQ ID NO: 32 and SEQ ID NO: 59; SEQ ID NO: 32 and SEQ ID NO: 60; SEQ ID NO: 32 and SEQ ID NO: 61; SEQ ID NO: 32 and SEQ ID NO: 62; SEQ ID NO: 32 and SEQ ID NO: 63; SEQ ID NO: 32 and SEQ ID NO: 64; SEQ ID NO: 32 and SEQ ID NO: 65; SEQ ID NO: 32 and SEQ ID NO: 66; SEQ ID NO: 32 and SEQ ID NO: 67; SEQ ID NO: 32 and SEQ ID NO: 68; SEQ ID NO: 32 and SEQ ID NO: 69; SEQ ID NO: 33 and SEQ ID NO: 34; SEQ ID NO: 33 and SEQ ID NO: 35; SEQ ID NO: 33 and SEQ ID NO: 36; SEQ ID NO: 33 and SEQ ID NO: 37; SEQ ID NO: 33 and SEQ ID NO: 38; SEQ ID NO: 33 and SEQ ID NO: 39; SEQ ID NO: 33 and SEQ ID NO: 40; SEQ ID NO: 33 and SEQ ID NO: 41; SEQ ID NO: 33 and SEQ ID NO: 42; SEQ ID NO: 33 and SEQ ID NO: 43; SEQ ID NO: 33 and SEQ ID NO: 44; SEQ ID NO: 33 and SEQ ID NO: 45; SEQ ID NO: 33 and SEQ ID NO: 46; SEQ ID NO: 33 and SEQ ID NO: 47; SEQ ID NO: 33 and SEQ ID NO: 48; SEQ ID NO: 33 and SEQ ID NO: 53; SEQ ID NO: 33 and SEQ ID NO: 54; SEQ ID NO: 33 and SEQ ID NO: 55; SEQ ID NO: 33 and SEQ ID NO: 56; SEQ ID NO: 33 and SEQ ID NO: 57; SEQ ID NO: 33 and SEQ ID NO: 58; SEQ ID NO: 33 and SEQ ID NO: 59; SEQ ID NO: 33 and SEQ ID NO: 60; SEQ ID NO: 33 and SEQ ID NO: 61; SEQ ID NO: 33 and SEQ ID NO: 62; SEQ ID NO: 33 and SEQ ID NO: 63; SEQ ID NO: 33 and SEQ ID NO: 64; SEQ ID NO: 33 and SEQ ID NO: 65; SEQ ID NO: 33 and SEQ ID NO: 66; SEQ ID NO: 33 and SEQ ID NO: 67; SEQ ID NO: 33 and SEQ ID NO: 68; SEQ ID NO: 33 and SEQ ID NO: 69; SEQ ID NO: 34 and SEQ ID NO: 35; SEQ ID NO: 34 and SEQ ID NO: 36; SEQ ID NO: 34 and SEQ ID NO: 37; SEQ ID NO: 34 and SEQ ID NO: 38; SEQ ID NO: 34 and SEQ ID NO: 39; SEQ ID NO: 34 and SEQ ID NO: 40; SEQ ID NO: 34 and SEQ ID NO: 41; SEQ ID NO: 34 and SEQ ID NO: 42; SEQ ID NO: 34 and SEQ ID NO: 43; SEQ ID NO: 34 and SEQ ID NO: 44; SEQ ID NO: 34 and SEQ ID NO: 45; SEQ ID NO: 34 and SEQ ID NO: 46; SEQ ID NO: 34 and SEQ ID NO: 47; SEQ ID NO: 34 and SEQ ID NO: 48; SEQ ID NO: 34 and SEQ ID NO: 53; SEQ ID NO: 34 and SEQ ID NO: 54; SEQ ID NO: 34 and SEQ ID NO: 55; SEQ ID NO: 34 and SEQ ID NO: 56; SEQ ID NO: 34 and SEQ ID NO: 57; SEQ ID NO: 34 and SEQ ID NO: 58; SEQ ID NO: 34 and SEQ ID NO: 59; SEQ ID NO: 34 and SEQ ID NO: 60; SEQ ID NO: 34 and SEQ ID NO: 61; SEQ ID NO: 34 and SEQ ID NO: 62; SEQ ID NO: 34 and SEQ ID NO: 63; SEQ ID NO: 34 and SEQ ID NO: 64; SEQ ID NO: 34 and SEQ ID NO: 65; SEQ ID NO: 34 and SEQ ID NO: 66; SEQ ID NO: 34 and SEQ ID NO: 67; SEQ ID NO: 34 and SEQ ID NO: 68; SEQ ID NO: 34 and SEQ ID NO: 69; SEQ ID NO: 35 and SEQ ID NO: 36; SEQ ID NO: 35 and SEQ ID NO: 37; SEQ ID NO: 35 and SEQ ID NO: 38; SEQ ID NO: 35 and SEQ ID NO: 39; SEQ ID NO: 35 and SEQ ID NO: 40; SEQ ID NO: 35 and SEQ ID NO: 41; SEQ ID NO: 35 and SEQ ID NO: 42; SEQ ID NO: 35 and SEQ ID NO: 43; SEQ ID NO: 35 and SEQ ID NO: 44; SEQ ID NO: 35 and SEQ ID NO: 45; SEQ ID NO: 35 and SEQ ID NO: 46; SEQ ID NO: 35 and SEQ ID NO: 47; SEQ ID NO: 35 and SEQ ID NO: 48; SEQ ID NO: 35 and SEQ ID NO: 53; SEQ ID NO: 35 and SEQ ID NO: 54; SEQ ID NO: 35 and SEQ ID NO: 55; SEQ ID NO: 35 and SEQ ID NO: 56; SEQ ID NO: 35 and SEQ ID NO: 57; SEQ ID NO: 35 and SEQ ID NO: 58; SEQ ID NO: 35 and SEQ ID NO: 59; SEQ ID NO: 35 and SEQ ID NO: 60; SEQ ID NO: 35 and SEQ ID NO: 61; SEQ ID NO: 35 and SEQ ID NO: 62; SEQ ID NO: 35 and SEQ ID NO: 63; SEQ ID NO: 35 and SEQ ID NO: 64; SEQ ID NO: 35 and SEQ ID NO: 65; SEQ ID NO: 35 and SEQ ID NO: 66; SEQ ID NO: 35 and SEQ ID NO: 67; SEQ ID NO: 35 and SEQ ID NO: 68; SEQ ID NO: 35 and SEQ ID NO: 69; SEQ ID NO: 36 and SEQ ID NO: 37; SEQ ID NO: 36 and SEQ ID NO: 38; SEQ ID NO: 36 and SEQ ID NO: 39; SEQ ID NO: 36 and SEQ ID NO: 40; SEQ ID NO: 36 and SEQ ID NO: 41; SEQ ID NO: 36 and SEQ ID NO: 42; SEQ ID NO: 36 and SEQ ID NO: 43; SEQ ID NO: 36 and SEQ ID NO: 44; SEQ ID NO: 36 and SEQ ID NO: 45; SEQ ID NO: 36 and SEQ ID NO: 46; SEQ ID NO: 36 and SEQ ID NO: 47; SEQ ID NO: 36 and SEQ ID NO: 48; SEQ ID NO: 36 and SEQ ID NO: 53; SEQ ID NO: 36 and SEQ ID NO: 54; SEQ ID NO: 36 and SEQ ID NO: 55; SEQ ID NO: 36 and SEQ ID NO: 56; SEQ ID NO: 36 and SEQ ID NO: 57; SEQ ID NO: 36 and SEQ ID NO: 58; SEQ ID NO: 36 and SEQ ID NO: 59; SEQ ID NO: 36 and SEQ ID NO: 60; SEQ ID NO: 36 and SEQ ID NO: 61; SEQ ID NO: 36 and SEQ ID NO: 62; SEQ ID NO: 36 and SEQ ID NO: 63; SEQ ID NO: 36 and SEQ ID NO: 64; SEQ ID NO: 36 and SEQ ID NO: 65; SEQ ID NO: 36 and SEQ ID NO: 66; SEQ ID NO: 36 and SEQ ID NO: 67; SEQ ID NO: 36 and SEQ ID NO: 68; SEQ ID NO: 36 and SEQ ID NO: 69; SEQ ID NO: 37 and SEQ ID NO: 38; SEQ ID NO: 37 and SEQ ID NO: 39; SEQ ID NO: 37 and SEQ ID NO: 40; SEQ ID NO: 37 and SEQ ID NO: 41; SEQ ID NO: 37 and SEQ ID NO: 42; SEQ ID NO: 37 and SEQ ID NO: 43; SEQ ID NO: 37 and SEQ ID NO: 44; SEQ ID NO: 37 and SEQ ID NO: 45; SEQ ID NO: 37 and SEQ ID NO: 46; SEQ ID NO: 37 and SEQ ID NO: 47; SEQ ID NO: 37 and SEQ ID NO: 48; SEQ ID NO: 37 and SEQ ID NO: 53; SEQ ID NO: 37 and SEQ ID NO: 54; SEQ ID NO: 37 and SEQ ID NO: 55; SEQ ID NO: 37 and SEQ ID NO: 56; SEQ ID NO: 37 and SEQ ID NO: 57; SEQ ID NO: 37 and SEQ ID NO: 58; SEQ ID NO: 37 and SEQ ID NO: 59; SEQ ID NO: 37 and SEQ ID NO: 60; SEQ ID NO: 37 and SEQ ID NO: 61; SEQ ID NO: 37 and SEQ ID NO: 62; SEQ ID NO: 37 and SEQ ID NO: 63; SEQ ID NO: 37 and SEQ ID NO: 64; SEQ ID NO: 37 and SEQ ID NO: 65; SEQ ID NO: 37 and SEQ ID NO: 66; SEQ ID NO: 37 and SEQ ID NO: 67; SEQ ID NO: 37 and SEQ ID NO: 68; SEQ ID NO: 37 and SEQ ID NO: 69; SEQ ID NO: 38 and SEQ ID NO: 39; SEQ ID NO: 38 and SEQ ID NO: 40; SEQ ID NO: 38 and SEQ ID NO: 41; SEQ ID NO: 38 and SEQ ID NO: 42; SEQ ID NO: 38 and SEQ ID NO: 43; SEQ ID NO: 38 and SEQ ID NO: 44; SEQ ID NO: 38 and SEQ ID NO: 45; SEQ ID NO: 38 and SEQ ID NO: 46; SEQ ID NO: 38 and SEQ ID NO: 47; SEQ ID NO: 38 and SEQ ID NO: 48; SEQ ID NO: 38 and SEQ ID NO: 53; SEQ ID NO: 38 and SEQ ID NO: 54; SEQ ID NO: 38 and SEQ ID NO: 55; SEQ ID NO: 38 and SEQ ID NO: 56; SEQ ID NO: 38 and SEQ ID NO: 57; SEQ ID NO: 38 and SEQ ID NO: 58; SEQ ID NO: 38 and SEQ ID NO: 59; SEQ ID NO: 38 and SEQ ID NO: 60; SEQ ID NO: 38 and SEQ ID NO: 61; SEQ ID NO: 38 and SEQ ID NO: 62; SEQ ID NO: 38 and SEQ ID NO: 63; SEQ ID NO: 38 and SEQ ID NO: 64; SEQ ID NO: 38 and SEQ ID NO: 65; SEQ ID NO: 38 and SEQ ID NO: 66; SEQ ID NO: 38 and SEQ ID NO: 67; SEQ ID NO: 38 and SEQ ID NO: 68; SEQ ID NO: 38 and SEQ ID NO: 69; SEQ ID NO: 39 and SEQ ID NO: 40; SEQ ID NO: 39 and SEQ ID NO: 41; SEQ ID NO: 39 and SEQ ID NO: 42; SEQ ID NO: 39 and SEQ ID NO: 43; SEQ ID NO: 39 and SEQ ID NO: 44; SEQ ID NO: 39 and SEQ ID NO: 45; SEQ ID NO: 39 and SEQ ID NO: 46; SEQ ID NO: 39 and SEQ ID NO: 47; SEQ ID NO: 39 and SEQ ID NO: 48; SEQ ID NO: 39 and SEQ ID NO: 53; SEQ ID NO: 39 and SEQ ID NO: 54; SEQ ID NO: 39 and SEQ ID NO: 55; SEQ ID NO: 39 and SEQ ID NO: 56; SEQ ID NO: 39 and SEQ ID NO: 57; SEQ ID NO: 39 and SEQ ID NO: 58; SEQ ID NO: 39 and SEQ ID NO: 59; SEQ ID NO: 39 and SEQ ID NO: 60; SEQ ID NO: 39 and SEQ ID NO: 61; SEQ ID NO: 39 and SEQ ID NO: 62; SEQ ID NO: 39 and SEQ ID NO: 63; SEQ ID NO: 39 and SEQ ID NO: 64; SEQ ID NO: 39 and SEQ ID NO: 65; SEQ ID NO: 39 and SEQ ID NO: 66; SEQ ID NO: 39 and SEQ ID NO: 67; SEQ ID NO: 39 and SEQ ID NO: 68; SEQ ID NO: 39 and SEQ ID NO: 69; SEQ ID NO: 40 and SEQ ID NO: 41; SEQ ID NO: 40 and SEQ ID NO: 42; SEQ ID NO: 40 and SEQ ID NO: 43; SEQ ID NO: 40 and SEQ ID NO: 44; SEQ ID NO: 40 and SEQ ID NO: 45; SEQ ID NO: 40 and SEQ ID NO: 46; SEQ ID NO: 40 and SEQ ID NO: 47; SEQ ID NO: 40 and SEQ ID NO: 48; SEQ ID NO: 40 and SEQ ID NO: 53; SEQ ID NO: 40 and SEQ ID NO: 54; SEQ ID NO: 40 and SEQ ID NO: 55; SEQ ID NO: 40 and SEQ ID NO: 56; SEQ ID NO: 40 and SEQ ID NO: 57; SEQ ID NO: 40 and SEQ ID NO: 58; SEQ ID NO: 40 and SEQ ID NO: 59; SEQ ID NO: 40 and SEQ ID NO: 60; SEQ ID NO: 40 and SEQ ID NO: 61; SEQ ID NO: 40 and SEQ ID NO: 62; SEQ ID NO: 40 and SEQ ID NO: 63; SEQ ID NO: 40 and SEQ ID NO: 64; SEQ ID NO: 40 and SEQ ID NO: 65; SEQ ID NO: 40 and SEQ ID NO: 66; SEQ ID NO: 40 and SEQ ID NO: 67; SEQ ID NO: 40 and SEQ ID NO: 68; SEQ ID NO: 40 and SEQ ID NO: 69; SEQ ID NO: 41 and SEQ ID NO: 42; SEQ ID NO: 41 and SEQ ID NO: 43; SEQ ID NO: 41 and SEQ ID NO: 44; SEQ ID NO: 41 and SEQ ID NO: 45; SEQ ID NO: 41 and SEQ ID NO: 46; SEQ ID NO: 41 and SEQ ID NO: 47; SEQ ID NO: 41 and SEQ ID NO: 48; SEQ ID NO: 41 and SEQ ID NO: 53; SEQ ID NO: 41 and SEQ ID NO: 54; SEQ ID NO: 41 and SEQ ID NO: 55; SEQ ID NO: 41 and SEQ ID NO: 56; SEQ ID NO: 41 and SEQ ID NO: 57; SEQ ID NO: 41 and SEQ ID NO: 58; SEQ ID NO: 41 and SEQ ID NO: 59; SEQ ID NO: 41 and SEQ ID NO: 60; SEQ ID NO: 41 and SEQ ID NO: 61; SEQ ID NO: 41 and SEQ ID NO: 62; SEQ ID NO: 41 and SEQ ID NO: 63; SEQ ID NO: 41 and SEQ ID NO: 64; SEQ ID NO: 41 and SEQ ID NO: 65; SEQ ID NO: 41 and SEQ ID NO: 66; SEQ ID NO: 41 and SEQ ID NO: 67; SEQ ID NO: 41 and SEQ ID NO: 68; SEQ ID NO: 41 and SEQ ID NO: 69; SEQ ID NO: 42 and SEQ ID NO: 43; SEQ ID NO: 42 and SEQ ID NO: 44; SEQ ID NO: 42 and SEQ ID NO: 45; SEQ ID NO: 42 and SEQ ID NO: 46; SEQ ID NO: 42 and SEQ ID NO: 47; SEQ ID NO: 42 and SEQ ID NO: 48; SEQ ID NO: 42 and SEQ ID NO: 53; SEQ ID NO: 42 and SEQ ID NO: 54; SEQ ID NO: 42 and SEQ ID NO: 55; SEQ ID NO: 42 and SEQ ID NO: 56; SEQ ID NO: 42 and SEQ ID NO: 57; SEQ ID NO: 42 and SEQ ID NO: 58; SEQ ID NO: 42 and SEQ ID NO: 59; SEQ ID NO: 42 and SEQ ID NO: 60; SEQ ID NO: 42 and SEQ ID NO: 61; SEQ ID NO: 42 and SEQ ID NO: 62; SEQ ID NO: 42 and SEQ ID NO: 63; SEQ ID NO: 42 and SEQ ID NO: 64; SEQ ID NO: 42 and SEQ ID NO: 65; SEQ ID NO: 42 and SEQ ID NO: 66; SEQ ID NO: 42 and SEQ ID NO: 67; SEQ ID NO: 42 and SEQ ID NO: 68; SEQ ID NO: 42 and SEQ ID NO: 69; SEQ ID NO: 43 and SEQ ID NO: 44; SEQ ID NO: 43 and SEQ ID NO: 45; SEQ ID NO: 43 and SEQ ID NO: 46; SEQ ID NO: 43 and SEQ ID NO: 47; SEQ ID NO: 43 and SEQ ID NO: 48; SEQ ID NO: 43 and SEQ ID NO: 53; SEQ ID NO: 43 and SEQ ID NO: 54; SEQ ID NO: 43 and SEQ ID NO: 55; SEQ ID NO: 43 and SEQ ID NO: 56; SEQ ID NO: 43 and SEQ ID NO: 57; SEQ ID NO: 43 and SEQ ID NO: 58; SEQ ID NO: 43 and SEQ ID NO: 59; SEQ ID NO: 43 and SEQ ID NO: 60; SEQ ID NO: 43 and SEQ ID NO: 61; SEQ ID NO: 43 and SEQ ID NO: 62; SEQ ID NO: 43 and SEQ ID NO: 63; SEQ ID NO: 43 and SEQ ID NO: 64; SEQ ID NO: 43 and SEQ ID NO: 65; SEQ ID NO: 43 and SEQ ID NO: 66; SEQ ID NO: 43 and SEQ ID NO: 67; SEQ ID NO: 43 and SEQ ID NO: 68; SEQ ID NO: 43 and SEQ ID NO: 69; SEQ ID NO: 44 and SEQ ID NO: 45; SEQ ID NO: 44 and SEQ ID NO: 46; SEQ ID NO: 44 and SEQ ID NO: 47; SEQ ID NO: 44 and SEQ ID NO: 48; SEQ ID NO: 44 and SEQ ID NO: 53; SEQ ID NO: 44 and SEQ ID NO: 54; SEQ ID NO: 44 and SEQ ID NO: 55; SEQ ID NO: 44 and SEQ ID NO: 56; SEQ ID NO: 44 and SEQ ID NO: 57; SEQ ID NO: 44 and SEQ ID NO: 58; SEQ ID NO: 44 and SEQ ID NO: 59; SEQ ID NO: 44 and SEQ ID NO: 60; SEQ ID NO: 44 and SEQ ID NO: 61; SEQ ID NO: 44 and SEQ ID NO: 62; SEQ ID NO: 44 and SEQ ID NO: 63; SEQ ID NO: 44 and SEQ ID NO: 64; SEQ ID NO: 44 and SEQ ID NO: 65; SEQ ID NO: 44 and SEQ ID NO: 66; SEQ ID NO: 44 and SEQ ID NO: 67; SEQ ID NO: 44 and SEQ ID NO: 68; SEQ ID NO: 44 and SEQ ID NO: 69; SEQ ID NO: 45 and SEQ ID NO: 46; SEQ ID NO: 45 and SEQ ID NO: 47; SEQ ID NO: 45 and SEQ ID NO: 48; SEQ ID NO: 45 and SEQ ID NO: 53; SEQ ID NO: 45 and SEQ ID NO: 54; SEQ ID NO: 45 and SEQ ID NO: 55; SEQ ID NO: 45 and SEQ ID NO: 56; SEQ ID NO: 45 and SEQ ID NO: 57; SEQ ID NO: 45 and SEQ ID NO: 58; SEQ ID NO: 45 and SEQ ID NO: 59; SEQ ID NO: 45 and SEQ ID NO: 60; SEQ ID NO: 45 and SEQ ID NO: 61; SEQ ID NO: 45 and SEQ ID NO: 62; SEQ ID NO: 45 and SEQ ID NO: 63; SEQ ID NO: 45 and SEQ ID NO: 64; SEQ ID NO: 45 and SEQ ID NO: 65; SEQ ID NO: 45 and SEQ ID NO: 66; SEQ ID NO: 45 and SEQ ID NO: 67; SEQ ID NO: 45 and SEQ ID NO: 68; SEQ ID NO: 45 and SEQ ID NO: 69; SEQ ID NO: 46 and SEQ ID NO: 47; SEQ ID NO: 46 and SEQ ID NO: 48; SEQ ID NO: 46 and SEQ ID NO: 53; SEQ ID NO: 46 and SEQ ID NO: 54; SEQ ID NO: 46 and SEQ ID NO: 55; SEQ ID NO: 46 and SEQ ID NO: 56; SEQ ID NO: 46 and SEQ ID NO: 57; SEQ ID NO: 46 and SEQ ID NO: 58; SEQ ID NO: 46 and SEQ ID NO: 59; SEQ ID NO: 46 and SEQ ID NO: 60; SEQ ID NO: 46 and SEQ ID NO: 61; SEQ ID NO: 46 and SEQ ID NO: 62; SEQ ID NO: 46 and SEQ ID NO: 63; SEQ ID NO: 46 and SEQ ID NO: 64; SEQ ID NO: 46 and SEQ ID NO: 65; SEQ ID NO: 46 and SEQ ID NO: 66; SEQ ID NO: 46 and SEQ ID NO: 67; SEQ ID NO: 46 and SEQ ID NO: 68; SEQ ID NO: 46 and SEQ ID NO: 69; SEQ ID NO: 47 and SEQ ID NO: 48; SEQ ID NO: 47 and SEQ ID NO: 53; SEQ ID NO: 47 and SEQ ID NO: 54; SEQ ID NO: 47 and SEQ ID NO: 55; SEQ ID NO: 47 and SEQ ID NO: 56; SEQ ID NO: 47 and SEQ ID NO: 57; SEQ ID NO: 47 and SEQ ID NO: 58; SEQ ID NO: 47 and SEQ ID NO: 59; SEQ ID NO: 47 and SEQ ID NO: 60; SEQ ID NO: 47 and SEQ ID NO: 61; SEQ ID NO: 47 and SEQ ID NO: 62; SEQ ID NO: 47 and SEQ ID NO: 63; SEQ ID NO: 47 and SEQ ID NO: 64; SEQ ID NO: 47 and SEQ ID NO: 65; SEQ ID NO: 47 and SEQ ID NO: 66; SEQ ID NO: 47 and SEQ ID NO: 67; SEQ ID NO: 47 and SEQ ID NO: 68; SEQ ID NO: 47 and SEQ ID NO: 69; SEQ ID NO: 48 and SEQ ID NO: 53; SEQ ID NO: 48 and SEQ ID NO: 54; SEQ ID NO: 48 and SEQ ID NO: 55; SEQ ID NO: 48 and SEQ ID NO: 56; SEQ ID NO: 48 and SEQ ID NO: 57; SEQ ID NO: 48 and SEQ ID NO: 58; SEQ ID NO: 48 and SEQ ID NO: 59; SEQ ID NO: 48 and SEQ ID NO: 60; SEQ ID NO: 48 and SEQ ID NO: 61; SEQ ID NO: 48 and SEQ ID NO: 62; SEQ ID NO: 48 and SEQ ID NO: 63; SEQ ID NO: 48 and SEQ ID NO: 64; SEQ ID NO: 48 and SEQ ID NO: 65; SEQ ID NO: 48 and SEQ ID NO: 66; SEQ ID NO: 48 and SEQ ID NO: 67; SEQ ID NO: 48 and SEQ ID NO: 68; SEQ ID NO: 48 and SEQ ID NO: 69; SEQ ID NO: 53 and SEQ ID NO: 54; SEQ ID NO: 53 and SEQ ID NO: 55; SEQ ID NO: 53 and SEQ ID NO: 56; SEQ ID NO: 53 and SEQ ID NO: 57; SEQ ID NO: 53 and SEQ ID NO: 58; SEQ ID NO: 53 and SEQ ID NO: 59; SEQ ID NO: 53 and SEQ ID NO: 60; SEQ ID NO: 53 and SEQ ID NO: 61; SEQ ID NO: 53 and SEQ ID NO: 62; SEQ ID NO: 53 and SEQ ID NO: 63; SEQ ID NO: 53 and SEQ ID NO: 64; SEQ ID NO: 53 and SEQ ID NO: 65; SEQ ID NO: 53 and SEQ ID NO: 66; SEQ ID NO: 53 and SEQ ID NO: 67; SEQ ID NO: 53 and SEQ ID NO: 68; SEQ ID NO: 53 and SEQ ID NO: 69; SEQ ID NO: 54 and SEQ ID NO: 55; SEQ ID NO: 54 and SEQ ID NO: 56; SEQ ID NO: 54 and SEQ ID NO: 57; SEQ ID NO: 54 and SEQ ID NO: 58; SEQ ID NO: 54 and SEQ ID NO: 59; SEQ ID NO: 54 and SEQ ID NO: 60; SEQ ID NO: 54 and SEQ ID NO: 61; SEQ ID NO: 54 and SEQ ID NO: 62; SEQ ID NO: 54 and SEQ ID NO: 63; SEQ ID NO: 54 and SEQ ID NO: 64; SEQ ID NO: 54 and SEQ ID NO: 65; SEQ ID NO: 54 and SEQ ID NO: 66; SEQ ID NO: 54 and SEQ ID NO: 67; SEQ ID NO: 54 and SEQ ID NO: 68; SEQ ID NO: 54 and SEQ ID NO: 69; SEQ ID NO: 55 and SEQ ID NO: 56; SEQ ID NO: 55 and SEQ ID NO: 57; SEQ ID NO: 55 and SEQ ID NO: 58; SEQ ID NO: 55 and SEQ ID NO: 59; SEQ ID NO: 55 and SEQ ID NO: 60; SEQ ID NO: 55 and SEQ ID NO: 61; SEQ ID NO: 55 and SEQ ID NO: 62; SEQ ID NO: 55 and SEQ ID NO: 63; SEQ ID NO: 55 and SEQ ID NO: 64; SEQ ID NO: 55 and SEQ ID NO: 65; SEQ ID NO: 55 and SEQ ID NO: 66; SEQ ID NO: 55 and SEQ ID NO: 67; SEQ ID NO: 55 and SEQ ID NO: 68; SEQ ID NO: 55 and SEQ ID NO: 69; SEQ ID NO: 56 and SEQ ID NO: 57; SEQ ID NO: 56 and SEQ ID NO: 58; SEQ ID NO: 56 and SEQ ID NO: 59; SEQ ID NO: 56 and SEQ ID NO: 60; SEQ ID NO: 56 and SEQ ID NO: 61; SEQ ID NO: 56 and SEQ ID NO: 62; SEQ ID NO: 56 and SEQ ID NO: 63; SEQ ID NO: 56 and SEQ ID NO: 64; SEQ ID NO: 56 and SEQ ID NO: 65; SEQ ID NO: 56 and SEQ ID NO: 66; SEQ ID NO: 56 and SEQ ID NO: 67; SEQ ID NO: 56 and SEQ ID NO: 68; SEQ ID NO: 56 and SEQ ID NO: 69; SEQ ID NO: 57 and SEQ ID NO: 58; SEQ ID NO: 57 and SEQ ID NO: 59; SEQ ID NO: 57 and SEQ ID NO: 60; SEQ ID NO: 57 and SEQ ID NO: 61; SEQ ID NO: 57 and SEQ ID NO: 62; SEQ ID NO: 57 and SEQ ID NO: 63; SEQ ID NO: 57 and SEQ ID NO: 64; SEQ ID NO: 57 and SEQ ID NO: 65; SEQ ID NO: 57 and SEQ ID NO: 66; SEQ ID NO: 57 and SEQ ID NO: 67; SEQ ID NO: 57 and SEQ ID NO: 68; SEQ ID NO: 57 and SEQ ID NO: 69; SEQ ID NO: 58 and SEQ ID NO: 59; SEQ ID NO: 58 and SEQ ID NO: 60; SEQ ID NO: 58 and SEQ ID NO: 61; SEQ ID NO: 58 and SEQ ID NO: 62; SEQ ID NO: 58 and SEQ ID NO: 63; SEQ ID NO: 58 and SEQ ID NO: 64; SEQ ID NO: 58 and SEQ ID NO: 65; SEQ ID NO: 58 and SEQ ID NO: 66; SEQ ID NO: 58 and SEQ ID NO: 67; SEQ ID NO: 58 and SEQ ID NO: 68; SEQ ID NO: 58 and SEQ ID NO: 69; SEQ ID NO: 59 and SEQ ID NO: 60; SEQ ID NO: 59 and SEQ ID NO: 61; SEQ ID NO: 59 and SEQ ID NO: 62; SEQ ID NO: 59 and SEQ ID NO: 63; SEQ ID NO: 59 and SEQ ID NO: 64; SEQ ID NO: 59 and SEQ ID NO: 65; SEQ ID NO: 59 and SEQ ID NO: 66; SEQ ID NO: 59 and SEQ ID NO: 67; SEQ ID NO: 59 and SEQ ID NO: 68; SEQ ID NO: 59 and SEQ ID NO: 69; SEQ ID NO: 60 and SEQ ID NO: 61; SEQ ID NO: 60 and SEQ ID NO: 62; SEQ ID NO: 60 and SEQ ID NO: 63; SEQ ID NO: 60 and SEQ ID NO: 64; SEQ ID NO: 60 and SEQ ID NO: 65; SEQ ID NO: 60 and SEQ ID NO: 66; SEQ ID NO: 60 and SEQ ID NO: 67; SEQ ID NO: 60 and SEQ ID NO: 68; SEQ ID NO: 60 and SEQ ID NO: 69; SEQ ID NO: 61 and SEQ ID NO: 62; SEQ ID NO: 61 and SEQ ID NO: 63; SEQ ID NO: 61 and SEQ ID NO: 64; SEQ ID NO: 61 and SEQ ID NO: 65; SEQ ID NO: 61 and SEQ ID NO: 66; SEQ ID NO: 61 and SEQ ID NO: 67; SEQ ID NO: 61 and SEQ ID NO: 68; SEQ ID NO: 61 and SEQ ID NO: 69; SEQ ID NO: 62 and SEQ ID NO: 63; SEQ ID NO: 62 and SEQ ID NO: 64; SEQ ID NO: 62 and SEQ ID NO: 65; SEQ ID NO: 62 and SEQ ID NO: 66; SEQ ID NO: 62 and SEQ ID NO: 67; SEQ ID NO: 62 and SEQ ID NO: 68; SEQ ID NO: 62 and SEQ ID NO: 69; SEQ ID NO: 63 and SEQ ID NO: 64; SEQ ID NO: 63 and SEQ ID NO: 65; SEQ ID NO: 63 and SEQ ID NO: 66; SEQ ID NO: 63 and SEQ ID NO: 67; SEQ ID NO: 63 and SEQ ID NO: 68; SEQ ID NO: 63 and SEQ ID NO: 69; SEQ ID NO: 64 and SEQ ID NO: 65; SEQ ID NO: 64 and SEQ ID NO: 66; SEQ ID NO: 64 and SEQ ID NO: 67; SEQ ID NO: 64 and SEQ ID NO: 68; SEQ ID NO: 64 and SEQ ID NO: 69; SEQ ID NO: 65 and SEQ ID NO: 66; SEQ ID NO: 65 and SEQ ID NO: 67; SEQ ID NO: 65 and SEQ ID NO: 68; SEQ ID NO: 65 and SEQ ID NO: 69; SEQ ID NO: 66 and SEQ ID NO: 67; SEQ ID NO: 66 and SEQ ID NO: 68; SEQ ID NO: 66 and SEQ ID NO: 69; SEQ ID NO: 67 and SEQ ID NO: 68; SEQ ID NO: 67 and SEQ ID NO: 69; SEQ ID NO: 68 and SEQ ID NO: 69; SEQ ID NO: 243 and SEQ ID NO: 244; SEQ ID NO: 243 and SEQ ID NO: 245; SEQ ID NO: 243 and SEQ ID NO: 246; SEQ ID NO: 243 and SEQ ID NO: 247; SEQ ID NO: 243 and SEQ ID NO: 248; SEQ ID NO: 243 and SEQ ID NO: 249; SEQ ID NO: 243 and SEQ ID NO: 250; SEQ ID NO: 243 and SEQ ID NO: 251; SEQ ID NO: 243 and SEQ ID NO: 252; SEQ ID NO: 243 and SEQ ID NO: 253; SEQ ID NO: 243 and SEQ ID NO: 254; SEQ ID NO: 243 and SEQ ID NO: 255; SEQ ID NO: 243 and SEQ ID NO: 256; SEQ ID NO: 243 and SEQ ID NO: 257; SEQ ID NO: 243 and SEQ ID NO: 258; SEQ ID NO: 243 and SEQ ID NO: 259; SEQ ID NO: 243 and SEQ ID NO: 260; SEQ ID NO: 243 and SEQ ID NO: 261; SEQ ID NO: 243 and SEQ ID NO: 262; SEQ ID NO: 243 and SEQ ID NO: 263; SEQ ID NO: 243 and SEQ ID NO: 264; SEQ ID NO: 243 and SEQ ID NO: 265; SEQ ID NO: 243 and SEQ ID NO: 266; SEQ ID NO: 243 and SEQ ID NO: 267; SEQ ID NO: 243 and SEQ ID NO: 268; SEQ ID NO: 243 and SEQ ID NO: 269; SEQ ID NO: 244 and SEQ ID NO: 245; SEQ ID NO: 244 and SEQ ID NO: 246; SEQ ID NO: 244 and SEQ ID NO: 247; SEQ ID NO: 244 and SEQ ID NO: 248; SEQ ID NO: 244 and SEQ ID NO: 249; SEQ ID NO: 244 and SEQ ID NO: 250; SEQ ID NO: 244 and SEQ ID NO: 251; SEQ ID NO: 244 and SEQ ID NO: 252; SEQ ID NO: 244 and SEQ ID NO: 253; SEQ ID NO: 244 and SEQ ID NO: 254; SEQ ID NO: 244 and SEQ ID NO: 255; SEQ ID NO: 244 and SEQ ID NO: 256; SEQ ID NO: 244 and SEQ ID NO: 257; SEQ ID NO: 244 and SEQ ID NO: 258; SEQ ID NO: 244 and SEQ ID NO: 259; SEQ ID NO: 244 and SEQ ID NO: 260; SEQ ID NO: 244 and SEQ ID NO: 261; SEQ ID NO: 244 and SEQ ID NO: 262; SEQ ID NO: 244 and SEQ ID NO: 263; SEQ ID NO: 244 and SEQ ID NO: 264; SEQ ID NO: 244 and SEQ ID NO: 265; SEQ ID NO: 244 and SEQ ID NO: 266; SEQ ID NO: 244 and SEQ ID NO: 267; SEQ ID NO: 244 and SEQ ID NO: 268; SEQ ID NO: 244 and SEQ ID NO: 269; SEQ ID NO: 245 and SEQ ID NO: 246; SEQ ID NO: 245 and SEQ ID NO: 247; SEQ ID NO: 245 and SEQ ID NO: 248; SEQ ID NO: 245 and SEQ ID NO: 249; SEQ ID NO: 245 and SEQ ID NO: 250; SEQ ID NO: 245 and SEQ ID NO: 251; SEQ ID NO: 245 and SEQ ID NO: 252; SEQ ID NO: 245 and SEQ ID NO: 253; SEQ ID NO: 245 and SEQ ID NO: 254; SEQ ID NO: 245 and SEQ ID NO: 255; SEQ ID NO: 245 and SEQ ID NO: 256; SEQ ID NO: 245 and SEQ ID NO: 257; SEQ ID NO: 245 and SEQ ID NO: 258; SEQ ID NO: 245 and SEQ ID NO: 259; SEQ ID NO: 245 and SEQ ID NO: 260; SEQ ID NO: 245 and SEQ ID NO: 261; SEQ ID NO: 245 and SEQ ID NO: 262; SEQ ID NO: 245 and SEQ ID NO: 263; SEQ ID NO: 245 and SEQ ID NO: 264; SEQ ID NO: 245 and SEQ ID NO: 265; SEQ ID NO: 245 and SEQ ID NO: 266; SEQ ID NO: 245 and SEQ ID NO: 267; SEQ ID NO: 245 and SEQ ID NO: 268; SEQ ID NO: 245 and SEQ ID NO: 269; SEQ ID NO: 246 and SEQ ID NO: 247; SEQ ID NO: 246 and SEQ ID NO: 248; SEQ ID NO: 246 and SEQ ID NO: 249; SEQ ID NO: 246 and SEQ ID NO: 250; SEQ ID NO: 246 and SEQ ID NO: 251; SEQ ID NO: 246 and SEQ ID NO: 252; SEQ ID NO: 246 and SEQ ID NO: 253; SEQ ID NO: 246 and SEQ ID NO: 254; SEQ ID NO: 246 and SEQ ID NO: 255; SEQ ID NO: 246 and SEQ ID NO: 256; SEQ ID NO: 246 and SEQ ID NO: 257; SEQ ID NO: 246 and SEQ ID NO: 258; SEQ ID NO: 246 and SEQ ID NO: 259; SEQ ID NO: 246 and SEQ ID NO: 260; SEQ ID NO: 246 and SEQ ID NO: 261; SEQ ID NO: 246 and SEQ ID NO: 262; SEQ ID NO: 246 and SEQ ID NO: 263; SEQ ID NO: 246 and SEQ ID NO: 264; SEQ ID NO: 246 and SEQ ID NO: 265; SEQ ID NO: 246 and SEQ ID NO: 266; SEQ ID NO: 246 and SEQ ID NO: 267; SEQ ID NO: 246 and SEQ ID NO: 268; SEQ ID NO: 246 and SEQ ID NO: 269; SEQ ID NO: 247 and SEQ ID NO: 248; SEQ ID NO: 247 and SEQ ID NO: 249; SEQ ID NO: 247 and SEQ ID NO: 250; SEQ ID NO: 247 and SEQ ID NO: 251; SEQ ID NO: 247 and SEQ ID NO: 252; SEQ ID NO: 247 and SEQ ID NO: 253; SEQ ID NO: 247 and SEQ ID NO: 254; SEQ ID NO: 247 and SEQ ID NO: 255; SEQ ID NO: 247 and SEQ ID NO: 256; SEQ ID NO: 247 and SEQ ID NO: 257; SEQ ID NO: 247 and SEQ ID NO: 258; SEQ ID NO: 247 and SEQ ID NO: 259; SEQ ID NO: 247 and SEQ ID NO: 260; SEQ ID NO: 247 and SEQ ID NO: 261; SEQ ID NO: 247 and SEQ ID NO: 262; SEQ ID NO: 247 and SEQ ID NO: 263; SEQ ID NO: 247 and SEQ ID NO: 264; SEQ ID NO: 247 and SEQ ID NO: 265; SEQ ID NO: 247 and SEQ ID NO: 266; SEQ ID NO: 247 and SEQ ID NO: 267; SEQ ID NO: 247 and SEQ ID NO: 268; SEQ ID NO: 247 and SEQ ID NO: 269; SEQ ID NO: 248 and SEQ ID NO: 249; SEQ ID NO: 248 and SEQ ID NO: 250; SEQ ID NO: 248 and SEQ ID NO: 251; SEQ ID NO: 248 and SEQ ID NO: 252; SEQ ID NO: 248 and SEQ ID NO: 253; SEQ ID NO: 248 and SEQ ID NO: 254; SEQ ID NO: 248 and SEQ ID NO: 255; SEQ ID NO: 248 and SEQ ID NO: 256; SEQ ID NO: 248 and SEQ ID NO: 257; SEQ ID NO: 248 and SEQ ID NO: 258; SEQ ID NO: 248 and SEQ ID NO: 259; SEQ ID NO: 248 and SEQ ID NO: 260; SEQ ID NO: 248 and SEQ ID NO: 261; SEQ ID NO: 248 and SEQ ID NO: 262; SEQ ID NO: 248 and SEQ ID NO: 263; SEQ ID NO: 248 and SEQ ID NO: 264; SEQ ID NO: 248 and SEQ ID NO: 265; SEQ ID NO: 248 and SEQ ID NO: 266; SEQ ID NO: 248 and SEQ ID NO: 267; SEQ ID NO: 248 and SEQ ID NO: 268; SEQ ID NO: 248 and SEQ ID NO: 269; SEQ ID NO: 249 and SEQ ID NO: 250; SEQ ID NO: 249 and SEQ ID NO: 251; SEQ ID NO: 249 and SEQ ID NO: 252; SEQ ID NO: 249 and SEQ ID NO: 253; SEQ ID NO: 249 and SEQ ID NO: 254; SEQ ID NO: 249 and SEQ ID NO: 255; SEQ ID NO: 249 and SEQ ID NO: 256; SEQ ID NO: 249 and SEQ ID NO: 257; SEQ ID NO: 249 and SEQ ID NO: 258; SEQ ID NO: 249 and SEQ ID NO: 259; SEQ ID NO: 249 and SEQ ID NO: 260; SEQ ID NO: 249 and SEQ ID NO: 261; SEQ ID NO: 249 and SEQ ID NO: 262; SEQ ID NO: 249 and SEQ ID NO: 263; SEQ ID NO: 249 and SEQ ID NO: 264; SEQ ID NO: 249 and SEQ ID NO: 265; SEQ ID NO: 249 and SEQ ID NO: 266; SEQ ID NO: 249 and SEQ ID NO: 267; SEQ ID NO: 249 and SEQ ID NO: 268; SEQ ID NO: 249 and SEQ ID NO: 269; SEQ ID NO: 250 and SEQ ID NO: 251; SEQ ID NO: 250 and SEQ ID NO: 252; SEQ ID NO: 250 and SEQ ID NO: 253; SEQ ID NO: 250 and SEQ ID NO: 254; SEQ ID NO: 250 and SEQ ID NO: 255; SEQ ID NO: 250 and SEQ ID NO: 256; SEQ ID NO: 250 and SEQ ID NO: 257; SEQ ID NO: 250 and SEQ ID NO: 258; SEQ ID NO: 250 and SEQ ID NO: 259; SEQ ID NO: 250 and SEQ ID NO: 260; SEQ ID NO: 250 and SEQ ID NO: 261; SEQ ID NO: 250 and SEQ ID NO: 262; SEQ ID NO: 250 and SEQ ID NO: 263; SEQ ID NO: 250 and SEQ ID NO: 264; SEQ ID NO: 250 and SEQ ID NO: 265; SEQ ID NO: 250 and SEQ ID NO: 266; SEQ ID NO: 250 and SEQ ID NO: 267; SEQ ID NO: 250 and SEQ ID NO: 268; SEQ ID NO: 250 and SEQ ID NO: 269; SEQ ID NO: 251 and SEQ ID NO: 252; SEQ ID NO: 251 and SEQ ID NO: 253; SEQ ID NO: 251 and SEQ ID NO: 254; SEQ ID NO: 251 and SEQ ID NO: 255; SEQ ID NO: 251 and SEQ ID NO: 256; SEQ ID NO: 251 and SEQ ID NO: 257; SEQ ID NO: 251 and SEQ ID NO: 258; SEQ ID NO: 251 and SEQ ID NO: 259; SEQ ID NO: 251 and SEQ ID NO: 260; SEQ ID NO: 251 and SEQ ID NO: 261; SEQ ID NO: 251 and SEQ ID NO: 262; SEQ ID NO: 251 and SEQ ID NO: 263; SEQ ID NO: 251 and SEQ ID NO: 264; SEQ ID NO: 251 and SEQ ID NO: 265; SEQ ID NO: 251 and SEQ ID NO: 266; SEQ ID NO: 251 and SEQ ID NO: 267; SEQ ID NO: 251 and SEQ ID NO: 268; SEQ ID NO: 251 and SEQ ID NO: 269; SEQ ID NO: 252 and SEQ ID NO: 253; SEQ ID NO: 252 and SEQ ID NO: 254; SEQ ID NO: 252 and SEQ ID NO: 255; SEQ ID NO: 252 and SEQ ID NO: 256; SEQ ID NO: 252 and SEQ ID NO: 257; SEQ ID NO: 252 and SEQ ID NO: 258; SEQ ID NO: 252 and SEQ ID NO: 259; SEQ ID NO: 252 and SEQ ID NO: 260; SEQ ID NO: 252 and SEQ ID NO: 261; SEQ ID NO: 252 and SEQ ID NO: 262; SEQ ID NO: 252 and SEQ ID NO: 263; SEQ ID NO: 252 and SEQ ID NO: 264; SEQ ID NO: 252 and SEQ ID NO: 265; SEQ ID NO: 252 and SEQ ID NO: 266; SEQ ID NO: 252 and SEQ ID NO: 267; SEQ ID NO: 252 and SEQ ID NO: 268; SEQ ID NO: 252 and SEQ ID NO: 269; SEQ ID NO: 253 and SEQ ID NO: 254; SEQ ID NO: 253 and SEQ ID NO: 255; SEQ ID NO: 253 and SEQ ID NO: 256; SEQ ID NO: 253 and SEQ ID NO: 257; SEQ ID NO: 253 and SEQ ID NO: 258; SEQ ID NO: 253 and SEQ ID NO: 259; SEQ ID NO: 253 and SEQ ID NO: 260; SEQ ID NO: 253 and SEQ ID NO: 261; SEQ ID NO: 253 and SEQ ID NO: 262; SEQ ID NO: 253 and SEQ ID NO: 263; SEQ ID NO: 253 and SEQ ID NO: 264; SEQ ID NO: 253 and SEQ ID NO: 265; SEQ ID NO: 253 and SEQ ID NO: 266; SEQ ID NO: 253 and SEQ ID NO: 267; SEQ ID NO: 253 and SEQ ID NO: 268; SEQ ID NO: 253 and SEQ ID NO: 269; SEQ ID NO: 254 and SEQ ID NO: 255; SEQ ID NO: 254 and SEQ ID NO: 256; SEQ ID NO: 254 and SEQ ID NO: 257; SEQ ID NO: 254 and SEQ ID NO: 258; SEQ ID NO: 254 and SEQ ID NO: 259; SEQ ID NO: 254 and SEQ ID NO: 260; SEQ ID NO: 254 and SEQ ID NO: 261; SEQ ID NO: 254 and SEQ ID NO: 262; SEQ ID NO: 254 and SEQ ID NO: 263; SEQ ID NO: 254 and SEQ ID NO: 264; SEQ ID NO: 254 and SEQ ID NO: 265; SEQ ID NO: 254 and SEQ ID NO: 266; SEQ ID NO: 254 and SEQ ID NO: 267; SEQ ID NO: 254 and SEQ ID NO: 268; SEQ ID NO: 254 and SEQ ID NO: 269; SEQ ID NO: 255 and SEQ ID NO: 256; SEQ ID NO: 255 and SEQ ID NO: 257; SEQ ID NO: 255 and SEQ ID NO: 258; SEQ ID NO: 255 and SEQ ID NO: 259; SEQ ID NO: 255 and SEQ ID NO: 260; SEQ ID NO: 255 and SEQ ID NO: 261; SEQ ID NO: 255 and SEQ ID NO: 262; SEQ ID NO: 255 and SEQ ID NO: 263; SEQ ID NO: 255 and SEQ ID NO: 264; SEQ ID NO: 255 and SEQ ID NO: 265; SEQ ID NO: 255 and SEQ ID NO: 266; SEQ ID NO: 255 and SEQ ID NO: 267; SEQ ID NO: 255 and SEQ ID NO: 268; SEQ ID NO: 255 and SEQ ID NO: 269; SEQ ID NO: 256 and SEQ ID NO: 257; SEQ ID NO: 256 and SEQ ID NO: 258; SEQ ID NO: 256 and SEQ ID NO: 259; SEQ ID NO: 256 and SEQ ID NO: 260; SEQ ID NO: 256 and SEQ ID NO: 261; SEQ ID NO: 256 and SEQ ID NO: 262; SEQ ID NO: 256 and SEQ ID NO: 263; SEQ ID NO: 256 and SEQ ID NO: 264; SEQ ID NO: 256 and SEQ ID NO: 265; SEQ ID NO: 256 and SEQ ID NO: 266; SEQ ID NO: 256 and SEQ ID NO: 267; SEQ ID NO: 256 and SEQ ID NO: 268; SEQ ID NO: 256 and SEQ ID NO: 269; SEQ ID NO: 257 and SEQ ID NO: 258; SEQ ID NO: 257 and SEQ ID NO: 259; SEQ ID NO: 257 and SEQ ID NO: 260; SEQ ID NO: 257 and SEQ ID NO: 261; SEQ ID NO: 257 and SEQ ID NO: 262; SEQ ID NO: 257 and SEQ ID NO: 263; SEQ ID NO: 257 and SEQ ID NO: 264; SEQ ID NO: 257 and SEQ ID NO: 265; SEQ ID NO: 257 and SEQ ID NO: 266; SEQ ID NO: 257 and SEQ ID NO: 267; SEQ ID NO: 257 and SEQ ID NO: 268; SEQ ID NO: 257 and SEQ ID NO: 269; SEQ ID NO: 258 and SEQ ID NO: 259; SEQ ID NO: 258 and SEQ ID NO: 260; SEQ ID NO: 258 and SEQ ID NO: 261; SEQ ID NO: 258 and SEQ ID NO: 262; SEQ ID NO: 258 and SEQ ID NO: 263; SEQ ID NO: 258 and SEQ ID NO: 264; SEQ ID NO: 258 and SEQ ID NO: 265; SEQ ID NO: 258 and SEQ ID NO: 266; SEQ ID NO: 258 and SEQ ID NO: 267; SEQ ID NO: 258 and SEQ ID NO: 268; SEQ ID NO: 258 and SEQ ID NO: 269; SEQ ID NO: 259 and SEQ ID NO: 260; SEQ ID NO: 259 and SEQ ID NO: 261; SEQ ID NO: 259 and SEQ ID NO: 262; SEQ ID NO: 259 and SEQ ID NO: 263; SEQ ID NO: 259 and SEQ ID NO: 264; SEQ ID NO: 259 and SEQ ID NO: 265; SEQ ID NO: 259 and SEQ ID NO: 266; SEQ ID NO: 259 and SEQ ID NO: 267; SEQ ID NO: 259 and SEQ ID NO: 268; SEQ ID NO: 259 and SEQ ID NO: 269; SEQ ID NO: 260 and SEQ ID NO: 261; SEQ ID NO: 260 and SEQ ID NO: 262; SEQ ID NO: 260 and SEQ ID NO: 263; SEQ ID NO: 260 and SEQ ID NO: 264; SEQ ID NO: 260 and SEQ ID NO: 265; SEQ ID NO: 260 and SEQ ID NO: 266; SEQ ID NO: 260 and SEQ ID NO: 267; SEQ ID NO: 260 and SEQ ID NO: 268; SEQ ID NO: 260 and SEQ ID NO: 269; SEQ ID NO: 261 and SEQ ID NO: 262; SEQ ID NO: 261 and SEQ ID NO: 263; SEQ ID NO: 261 and SEQ ID NO: 264; SEQ ID NO: 261 and SEQ ID NO: 265; SEQ ID NO: 261 and SEQ ID NO: 266; SEQ ID NO: 261 and SEQ ID NO: 267; SEQ ID NO: 261 and SEQ ID NO: 268; SEQ ID NO: 261 and SEQ ID NO: 269; SEQ ID NO: 262 and SEQ ID NO: 263; SEQ ID NO: 262 and SEQ ID NO: 264; SEQ ID NO: 262 and SEQ ID NO: 265; SEQ ID NO: 262 and SEQ ID NO: 266; SEQ ID NO: 262 and SEQ ID NO: 267; SEQ ID NO: 262 and SEQ ID NO: 268; SEQ ID NO: 262 and SEQ ID NO: 269; SEQ ID NO: 263 and SEQ ID NO: 264; SEQ ID NO: 263 and SEQ ID NO: 265; SEQ ID NO: 263 and SEQ ID NO: 266; SEQ ID NO: 263 and SEQ ID NO: 267; SEQ ID NO: 263 and SEQ ID NO: 268; SEQ ID NO: 263 and SEQ ID NO: 269; SEQ ID NO: 264 and SEQ ID NO: 265; SEQ ID NO: 264 and SEQ ID NO: 266; SEQ ID NO: 264 and SEQ ID NO: 267; SEQ ID NO: 264 and SEQ ID NO: 268; SEQ ID NO: 264 and SEQ ID NO: 269; SEQ ID NO: 265 and SEQ ID NO: 266; SEQ ID NO: 265 and SEQ ID NO: 267; SEQ ID NO: 265 and SEQ ID NO: 268; SEQ ID NO: 265 and SEQ ID NO: 269; SEQ ID NO: 266 and SEQ ID NO: 267; SEQ ID NO: 266 and SEQ ID NO: 268; SEQ ID NO: 266 and SEQ ID NO: 269; SEQ ID NO: 267 and SEQ ID NO: 268; SEQ ID NO: 267 and SEQ ID NO: 269; and SEQ ID NO: 268 and SEQ ID NO: 269.
[0018] Embodiment 4 is a composition comprising:
[0019] a. a single nucleic acid molecule comprising:
   [0020] i. a nucleic acid molecule encoding Staphylococcus aureus Cas9 (SaCas9) or Staphylococcus lugdunensis (SluCas9) and at least one, at least two, or at least three guide RNAs; or
   [0021] ii. a nucleic acid molecule encoding Staphylococcus aureus Cas9 (SaCas9) or Staphylococcus lugdunensis (SluCas9) and from one to n guide RNAs, wherein n is no more than the maximum number of guide RNAs that can be expressed from said nucleic acid molecule; or
   [0022] iii. a nucleic acid molecule encoding Staphylococcus aureus Cas9 (SaCas9) or Staphylococcus lugdunensis (SluCas9) and 1, 2, or 3 guide RNAs;
   [0023] wherein each guide RNA is selected from Table 2, optionally wherein the composition comprises at least one pair of guide RNAs, wherein the at least one pair is selected from any one of the pairs shown in Table 1B for SaCas9, or Table 1D for SluCas9; or
   [0024] b. two nucleic acid molecules comprising:
      [0025] i. a first nucleic acid molecule encoding Staphylococcus aureus Cas9 (SaCas9) or Staphylococcus lugdunensis (SluCas9); and
         [0026] a second nucleic acid that does not encode a SaCas9 or SluCas9 and encodes any one of the following:
         1, at least one, at least two, at least three, at least four, at least five, or at least six guide RNAs; or
         2, from one to n guide RNAs, wherein n is no more than the maximum number of guide RNAs that can be expressed from said nucleic acid molecule; or
         3, from one to six guide RNAs; or
      [0027] ii. a first nucleic acid molecule encoding Staphylococcus aureus Cas9 (SaCas9) or Staphylococcus lugdunensis (SluCas9) and
         [0028] 1. at least one, at least two, or at least three guide RNAs; or
         [0029] 2. from one to n guide RNAs, wherein n is no more than the maximum number of guide RNAs that can be expressed from said nucleic acid molecule; or
         [0030] 3. 1, 2, or 3 guide RNAs; and
         [0031] a second nucleic acid molecule that does not encode a SaCas9 or SluCas9, optionally wherein the second nucleic acid molecule comprises any one of the following:
         1, at least one, at least two, at least three, at least four, at least five, or at least six guide RNAs; or
         2, from one to n guide RNAs, wherein n is no more than the maximum number of guide RNAs that can be expressed from said nucleic acid molecule; or
         3, from one to six guide RNAs; or
      [0032] iii. a first nucleic acid molecule encoding Staphylococcus aureus Cas9 (SaCas9) or Staphylococcus lugdunensis (SluCas9) and at least one, at least two, or at least three guide RNAs; and a second nucleic acid molecule that does not encode a SaCas9 or SluCas9 and encodes from one to six guide RNAs; or
      [0033] iv. a first nucleic acid encoding Staphylococcus aureus Cas9 (SaCas9) or Staphylococcus lugdunensis (SluCas9) and at least two guide RNAs, wherein a first guide RNA of the at least two guide RNAs binds upstream of a target sequence and a second guide RNA of the at least two guide RNAs binds downstream of the target sequence; and a second nucleic acid molecule that does not encode a SaCas9 or SluCas9 and encodes at least one additional copy of each of the guide RNAs encoded in the first nucleic acid molecule;
[0034] wherein each guide RNA is selected from Table 2, optionally wherein the composition comprises at least one pair of guide RNAs selected from any one of the pairs of guide RNAs shown in Table 1B for SaCas9, or Table 1D for SluCas9.
[0035] Embodiment 5 is the composition of any one of embodiments 1-4, comprising a pair of guide RNAs, wherein the pair of guide RNAs is capable of excising a DNA fragment from the DMD gene; wherein the DNA fragment is between 5 and 250 nucleotides in length.
[0036] Embodiment 6 is the composition of embodiment 5, wherein the excised DNA fragment does not comprise an entire exon of the DMD gene.
[0037] Embodiment 7 is a composition comprising a single nucleic acid molecule encoding a pair of guide RNAs and a Cas9, wherein the single nucleic acid molecule comprises:
   [0038] a. a first nucleic acid molecule encoding a pair of guide RNAs comprising a first and second guide sequence, wherein the pair of guide sequences is selected from any one of the following pairs of SEQ ID NOs: 11 and 12; 11 and 13; 11 and 14; 11 and 15; 12 and 13; 12 and 14; 12 and 15; 13 and 14; 13 and 15; 14 and 15; 27 and 28; 27 and 29; 27 and 30; 27 and 31; 27 and 32; 27 and 33; 27 and 34; 27 and 35; 27 and 36; 27 and 37; 27 and 38; 27 and 39; 27 and 40; 27 and 41; 27 and 42; 27 and 43; 27 and 44; 27 and 45; 27 and 46; 27 and 47; 27 and 48; 27 and 53; 27 and 54; 27 and 55; 27 and 56; 27 and 57; 27 and 58; 27 and 59; 27 and 60; 27 and 61; 27 and 62; 27 and 63; 27 and 64; 27 and 65; 27 and 66; 27 and 67; 27 and 68; 27 and 69; 28 and 29; 28 and 30; 28 and 31; 28 and 32; 28 and 33; 28 and 34; 28 and 35; 28 and 36; 28 and 37; 28 and 38; 28 and 39; 28 and 40; 28 and 41; 28 and 42; 28 and 43; 28 and 44; 28 and 45; 28 and 46; 28 and 47; 28 and 48; 28 and 53; 28 and 54; 28 and 55; 28 and 56; 28 and 57; 28 and 58; 28 and 59; 28 and 60; 28 and 61; 28 and 62; 28 and 63; 28 and 64; 28 and 65; 28 and 66; 28 and 67; 28 and 68; 28 and 69; 29 and 30; 29 and 31; 29 and 32; 29 and 33; 29 and 34; 29 and 35; 29 and 36; 29 and 37; 29 and 38; 29 and 39; 29 and 40; 29 and 41; 29 and 42; 29 and 43; 29 and 44; 29 and 45; 29 and 46; 29 and 47; 29 and 48; 29 and 53; 29 and 54; 29 and 55; 29 and 56; 29 and 57; 29 and 58; 29 and 59; 29 and 60; 29 and 61; 29 and 62; 29 and 63; 29 and 64; 29 and 65; 29 and 66; 29 and 67; 29 and 68; 29 and 69; 30 and 31; 30 and 32; 30 and 33; 30 and 34; 30 and 35; 30 and 36; 30 and 37; 30 and 38; 30 and 39; 30 and 40; 30 and 41; 30 and 42; 30 and 43; 30 and 44; 30 and 45; 30 and 46; 30 and 47; 30 and 48; 30 and 53; 30 and 54; 30 and 55; 30 and 56; 30 and 57; 30 and 58; 30 and 59; 30 and 60; 30 and 61; 30 and 62; 30 and 63; 30 and 64; 30 and 65; 30 and 66; 30 and 67; 30 and 68; 30 and 69; 31 and 32; 31 and 33; 31 and 34; 31 and 35; 31 and 36; 31 and 37; 31 and 38; 31 and 39; 31 and 40; 31 and 41; 31 and 42; 31 and 43; 31 and 44; 31 and 45; 31 and 46; 31 and 47; 31 and 48; 31 and 53; 31 and 54; 31 and 55; 31 and 56; 31 and 57; 31 and 58; 31 and 59; 31 and 60; 31 and 61; 31 and 62; 31 and 63; 31 and 64; 31 and 65; 31 and 66; 31 and 67; 31 and 68; 31 and 69; 32 and 33; 32 and 34; 32 and 35; 32 and 36; 32 and 37; 32 and 38; 32 and 39; 32 and 40; 32 and 41; 32 and 42; 32 and 43; 32 and 44; 32 and 45; 32 and 46; 32 and 47; 32 and 48; 32 and 53; 32 and 54; 32 and 55; 32 and 56; 32 and 57; 32 and 58; 32 and 59; 32 and 60; 32 and 61; 32 and 62; 32 and 63; 32 and 64; 32 and 65; 32 and 66; 32 and 67; 32 and 68; 32 and 69; 33 and 34; 33 and 35; 33 and 36; 33 and 37; 33 and 38; 33 and 39; 33 and 40; 33 and 41; 33 and 42; 33 and 43; 33 and 44; 33 and 45; 33 and 46; 33 and 47; 33 and 48; 33 and 53; 33 and 54; 33 and 55; 33 and 56; 33 and 57; 33 and 58; 33 and 59; 33 and 60; 33 and 61; 33 and 62; 33 and 63; 33 and 64; 33 and 65; 33 and 66; 33 and 67; 33 and 68; 33 and 69; 34 and 35; 34 and 36; 34 and 37; 34 and 38; 34 and 39; 34 and 40; 34 and 41; 34 and 42; 34 and 43; 34 and 44; 34 and 45; 34 and 46; 34 and 47; 34 and 48; 34 and 53; 34 and 54; 34 and 55; 34 and 56; 34 and 57; 34 and 58; 34 and 59; 34 and 60; 34 and 61; 34 and 62; 34 and 63; 34 and 64; 34 and 65; 34 and 66; 34 and 67; 34 and 68; 34 and 69; 35 and 36; 35 and 37; 35 and 38; 35 and 39; 35 and 40; 35 and 41; 35 and 42; 35 and 43; 35 and 44; 35 and 45; 35 and 46; 35 and 47; 35 and 48; 35 and 53; 35 and 54; 35 and 55; 35 and 56; 35 and 57; 35 and 58; 35 and 59; 35 and 60; 35 and 61; 35 and 62; 35 and 63; 35 and 64; 35 and 65; 35 and 66; 35 and 67; 35 and 68; 35 and 69; 36 and 37; 36 and 38; 36 and 39; 36 and 40; 36 and 41; 36 and 42; 36 and 43; 36 and 44; 36 and 45; 36 and 46; 36 and 47; 36 and 48; 36 and 53; 36 and 54; 36 and 55; 36 and 56; 36 and 57; 36 and 58; 36 and 59; 36 and 60; 36 and 61; 36 and 62; 36 and 63; 36 and 64; 36 and 65; 36 and 66; 36 and 67; 36 and 68; 36 and 69; 37 and 38; 37 and 39; 37 and 40; 37 and 41; 37 and 42; 37 and 43; 37 and 44; 37 and 45; 37 and 46; 37 and 47; 37 and 48; 37 and 53; 37 and 54; 37 and 55; 37 and 56; 37 and 57; 37 and 58; 37 and 59; 37 and 60; 37 and 61; 37 and 62; 37 and 63; 37 and 64; 37 and 65; 37 and 66; 37 and 67; 37 and 68; 37 and 69; 38 and 39; 38 and 40; 38 and 41; 38 and 42; 38 and 43; 38 and 44; 38 and 45; 38 and 46; 38 and 47; 38 and 48; 38 and 53; 38 and 54; 38 and 55; 38 and 56; 38 and 57; 38 and 58; 38 and 59; 38 and 60; 38 and 61; 38 and 62; 38 and 63; 38 and 64; 38 and 65; 38 and 66; 38 and 67; 38 and 68; 38 and 69; 39 and 40; 39 and 41; 39 and 42; 39 and 43; 39 and 44; 39 and 45; 39 and 46; 39 and 47; 39 and 48; 39 and 53; 39 and 54; 39 and 55; 39 and 56; 39 and 57; 39 and 58; 39 and 59; 39 and 60; 39 and 61; 39 and 62; 39 and 63; 39 and 64; 39 and 65; 39 and 66; 39 and 67; 39 and 68; 39 and 69; 40 and 41; 40 and 42; 40 and 43; 40 and 44; 40 and 45; 40 and 46; 40 and 47; 40 and 48; 40 and 53; 40 and 54; 40 and 55; 40 and 56; 40 and 57; 40 and 58; 40 and 59; 40 and 60; 40 and 61; 40 and 62; 40 and 63; 40 and 64; 40 and 65; 40 and 66; 40 and 67; 40 and 68; 40 and 69; 41 and 42; 41 and 43; 41 and 44; 41 and 45; 41 and 46; 41 and 47; 41 and 48; 41 and 53; 41 and 54; 41 and 55; 41 and 56; 41 and 57; 41 and 58; 41 and 59; 41 and 60; 41 and 61; 41 and 62; 41 and 63; 41 and 64; 41 and 65; 41 and 66; 41 and 67; 41 and 68; 41 and 69; 42 and 43; 42 and 44; 42 and 45; 42 and 46; 42 and 47; 42 and 48; 42 and 53; 42 and 54; 42 and 55; 42 and 56; 42 and 57; 42 and 58; 42 and 59; 42 and 60; 42 and 61; 42 and 62; 42 and 63; 42 and 64; 42 and 65; 42 and 66; 42 and 67; 42 and 68; 42 and 69; 43 and 44; 43 and 45; 43 and 46; 43 and 47; 43 and 48; 43 and 53; 43 and 54; 43 and 55; 43 and 56; 43 and 57; 43 and 58; 43 and 59; 43 and 60; 43 and 61; 43 and 62; 43 and 63; 43 and 64; 43 and 65; 43 and 66; 43 and 67; 43 and 68; 43 and 69; 44 and 45; 44 and 46; 44 and 47; 44 and 48; 44 and 53; 44 and 54; 44 and 55; 44 and 56; 44 and 57; 44 and 58; 44 and 59; 44 and 60; 44 and 61; 44 and 62; 44 and 63; 44 and 64; 44 and 65; 44 and 66; 44 and 67; 44 and 68; 44 and 69; 45 and 46; 45 and 47; 45 and 48; 45 and 53; 45 and 54; 45 and 55; 45 and 56; 45 and 57; 45 and 58; 45 and 59; 45 and 60; 45 and 61; 45 and 62; 45 and 63; 45 and 64; 45 and 65; 45 and 66; 45 and 67; 45 and 68; 45 and 69; 46 and 47; 46 and 48; 46 and 53; 46 and 54; 46 and 55; 46 and 56; 46 and 57; 46 and 58; 46 and 59; 46 and 60; 46 and 61; 46 and 62; 46 and 63; 46 and 64; 46 and 65; 46 and 66; 46 and 67; 46 and 68; 46 and 69; 47 and 48; 47 and 53; 47 and 54; 47 and 55; 47 and 56; 47 and 57; 47 and 58; 47 and 59; 47 and 60; 47 and 61; 47 and 62; 47 and 63; 47 and 64; 47 and 65; 47 and 66; 47 and 67; 47 and 68; 47 and 69; 48 and 53; 48 and 54; 48 and 55; 48 and 56; 48 and 57; 48 and 58; 48 and 59; 48 and 60; 48 and 61; 48 and 62; 48 and 63; 48 and 64; 48 and 65; 48 and 66; 48 and 67; 48 and 68; 48 and 69; 53 and 54; 53 and 55; 53 and 56; 53 and 57; 53 and 58; 53 and 59; 53 and 60; 53 and 61; 53 and 62; 53 and 63; 53 and 64; 53 and 65; 53 and 66; 53 and 67; 53 and 68; 53 and 69; 54 and 55; 54 and 56; 54 and 57; 54 and 58; 54 and 59; 54 and 60; 54 and 61; 54 and 62; 54 and 63; 54 and 64; 54 and 65; 54 and 66; 54 and 67; 54 and 68; 54 and 69; 55 and 56; 55 and 57; 55 and 58; 55 and 59; 55 and 60; 55 and 61; 55 and 62; 55 and 63; 55 and 64; 55 and 65; 55 and 66; 55 and 67; 55 and 68; 55 and 69; 56 and 57; 56 and 58; 56 and 59; 56 and 60; 56 and 61; 56 and 62; 56 and 63; 56 and 64; 56 and 65; 56 and 66; 56 and 67; 56 and 68; 56 and 69; 57 and 58; 57 and 59; 57 and 60; 57 and 61; 57 and 62; 57 and 63; 57 and 64; 57 and 65; 57 and 66; 57 and 67; 57 and 68; 57 and 69; 58 and 59; 58 and 60; 58 and 61; 58 and 62; 58 and 63; 58 and 64; 58 and 65; 58 and 66; 58 and 67; 58 and 68; 58 and 69; 59 and 60; 59 and 61; 59 and 62; 59 and 63; 59 and 64; 59 and 65; 59 and 66; 59 and 67; 59 and 68; 59 and 69; 60 and 61; 60 and 62; 60 and 63; 60 and 64; 60 and 65; 60 and 66; 60 and 67; 60 and 68; 60 and 69; 61 and 62; 61 and 63; 61 and 64; 61 and 65; 61 and 66; 61 and 67; 61 and 68; 61 and 69; 62 and 63; 62 and 64; 62 and 65; 62 and 66; 62 and 67; 62 and 68; 62 and 69; 63 and 64; 63 and 65; 63 and 66; 63 and 67; 63 and 68; 63 and 69; 64 and 65; 64 and 66; 64 and 67; 64 and 68; 64 and 69; 65 and 66; 65 and 67; 65 and 68; 65 and 69; 66 and 67; 66 and 68; 66 and 69; 67 and 68; 67 and 69; 68 and 69; and a second nucleic acid encoding a Staphylococcus aureus Cas9 (SaCas9); or
   [0039] b. a first nucleic acid molecule encoding a pair of guide, wherein the pair of guide RNAs is selected from any one of the following pairs of SEQ ID NOs: 243 and 244; 243 and 245; 243 and 246; 243 and 247; 243 and 248; 243 and 249; 243 and 250; 243 and 251; 243 and 252; 243 and 253; 243 and 254; 243 and 255; 243 and 256; 243 and 257; 243 and 258; 243 and 259; 243 and 260; 243 and 261; 243 and 262; 243 and 263; 243 and 264; 243 and 265; 243 and 266; 243 and 267; 243 and 268; 243 and 269; 244 and 245; 244 and 246; 244 and 247; 244 and 248; 244 and 249; 244 and 250; 244 and 251; 244 and 252; 244 and 253; 244 and 254; 244 and 255; 244 and 256; 244 and 257; 244 and 258; 244 and 259; 244 and 260; 244 and 261; 244 and 262; 244 and 263; 244 and 264; 244 and 265; 244 and 266; 244 and 267; 244 and 268; 244 and 269; 245 and 246; 245 and 247; 245 and 248; 245 and 249; 245 and 250; 245 and 251; 245 and 252; 245 and 253; 245 and 254; 245 and 255; 245 and 256; 245 and 257; 245 and 258; 245 and 259; 245 and 260; 245 and 261; 245 and 262; 245 and 263; 245 and 264; 245 and 265; 245 and 266; 245 and 267; 245 and 268; 245 and 269; 246 and 247; 246 and 248; 246 and 249; 246 and 250; 246 and 251; 246 and 252; 246 and 253; 246 and 254; 246 and 255; 246 and 256; 246 and 257; 246 and 258; 246 and 259; 246 and 260; 246 and 261; 246 and 262; 246 and 263; 246 and 264; 246 and 265; 246 and 266; 246 and 267; 246 and 268; 246 and 269; 247 and 248; 247 and 249; 247 and 250; 247 and 251; 247 and 252; 247 and 253; 247 and 254; 247 and 255; 247 and 256; 247 and 257; 247 and 258; 247 and 259; 247 and 260; 247 and 261; 247 and 262; 247 and 263; 247 and 264; 247 and 265; 247 and 266; 247 and 267; 247 and 268; 247 and 269; 248 and 249; 248 and 250; 248 and 251; 248 and 252; 248 and 253; 248 and 254; 248 and 255; 248 and 256; 248 and 257; 248 and 258; 248 and 259; 248 and 260; 248 and 261; 248 and 262; 248 and 263; 248 and 264; 248 and 265; 248 and 266; 248 and 267; 248 and 268; 248 and 269; 249 and 250; 249 and 251; 249 and 252; 249 and 253; 249 and 254; 249 and 255; 249 and 256; 249 and 257; 249 and 258; 249 and 259; 249 and 260; 249 and 261; 249 and 262; 249 and 263; 249 and 264; 249 and 265; 249 and 266; 249 and 267; 249 and 268; 249 and 269; 250 and 251; 250 and 252; 250 and 253; 250 and 254; 250 and 255; 250 and 256; 250 and 257; 250 and 258; 250 and 259; 250 and 260; 250 and 261; 250 and 262; 250 and 263; 250 and 264; 250 and 265; 250 and 266; 250 and 267; 250 and 268; 250 and 269; 251 and 252; 251 and 253; 251 and 254; 251 and 255; 251 and 256; 251 and 257; 251 and 258; 251 and 259; 251 and 260; 251 and 261; 251 and 262; 251 and 263; 251 and 264; 251 and 265; 251 and 266; 251 and 267; 251 and 268; 251 and 269; 252 and 253; 252 and 254; 252 and 255; 252 and 256; 252 and 257; 252 and 258; 252 and 259; 252 and 260; 252 and 261; 252 and 262; 252 and 263; 252 and 264; 252 and 265; 252 and 266; 252 and 267; 252 and 268; 252 and 269; 253 and 254; 253 and 255; 253 and 256; 253 and 257; 253 and 258; 253 and 259; 253 and 260; 253 and 261; 253 and 262; 253 and 263; 253 and 264; 253 and 265; 253 and 266; 253 and 267; 253 and 268; 253 and 269; 254 and 255; 254 and 256; 254 and 257; 254 and 258; 254 and 259; 254 and 260; 254 and 261; 254 and 262; 254 and 263; 254 and 264; 254 and 265; 254 and 266; 254 and 267; 254 and 268; 254 and 269; 255 and 256; 255 and 257; 255 and 258; 255 and 259; 255 and 260; 255 and 261; 255 and 262; 255 and 263; 255 and 264; 255 and 265; 255 and 266; 255 and 267; 255 and 268; 255 and 269; 256 and 257; 256 and 258; 256 and 259; 256 and 260; 256 and 261; 256 and 262; 256 and 263; 256 and 264; 256 and 265; 256 and 266; 256 and 267; 256 and 268; 256 and 269; 257 and 258; 257 and 259; 257 and 260; 257 and 261; 257 and 262; 257 and 263; 257 and 264; 257 and 265; 257 and 266; 257 and 267; 257 and 268; 257 and 269; 258 and 259; 258 and 260; 258 and 261; 258 and 262; 258 and 263; 258 and 264; 258 and 265; 258 and 266; 258 and 267; 258 and 268; 258 and 269; 259 and 260; 259 and 261; 259 and 262; 259 and 263; 259 and 264; 259 and 265; 259 and 266; 259 and 267; 259 and 268; 259 and 269; 260 and 261; 260 and 262; 260 and 263; 260 and 264; 260 and 265; 260 and 266; 260 and 267; 260 and 268; 260 and 269; 261 and 262; 261 and 263; 261 and 264; 261 and 265; 261 and 266; 261 and 267; 261 and 268; 261 and 269; 262 and 263; 262 and 264; 262 and 265; 262 and 266; 262 and 267; 262 and 268; 262 and 269; 263 and 264; 263 and 265; 263 and 266; 263 and 267; 263 and 268; 263 and 269; 264 and 265; 264 and 266; 264 and 267; 264 and 268; 264 and 269; 265 and 266; 265 and 267; 265 and 268; 265 and 269; 266 and 267; 266 and 268; 266 and 269; 267 and 268; 267 and 269; 268 and 269; and a second nucleic acid encoding a Staphylococcus lugdunensis (SluCas9); or
   [0040] c. a first nucleic acid molecule encoding a pair of guide RNAs selected from any one of the following pairs of guide RNAs targeting exon 51: SEQ ID NOs: 28 and 57; 31 and 57; 31 and 46; 32 and 69; 33 and 57; 33 and 69; 34 and 57; 36 and 69; 37 and 69; 37 and 46; 39 and 46; 40 and 46; 46 and 35; 46 and 62; 46 and 65; 46 and 67; 47 and 57; 48 and 57; 49 and 57; 51 and 57; 53 and 46; 54 and 46; 55 and 46; 58 and 46; 59 and 46; 60 and 46; 61 and 69; or 69 and 30; and a second nucleic acid encoding a Staphylococcus aureus Cas9 (SaCas9); or
   [0041] d. a first nucleic acid molecule encoding a pair of guide RNAs selected from any one of the following pairs of guide RNAs targeting exon 51: SEQ ID NOs: 243 and 252; 245 and 252; 252 and 253; 252 and 254; 252 and 256; 252 and 257; 252 and 258; 252 and 262; 252 and 264; 252 and 265; or 252 and 266; and a second nucleic acid encoding a Staphylococcus lugdunensis (SluCas9); or
      [0042] e. a first nucleic acid encoding a pair of guide RNAs selected from any one of the following pairs of guide RNAs targeting exon 51: SEQ ID NOs: 269 and 247; 252 and 254; 269 and 249; 252 and 262; or 252 and 264; and a second nucleic acid encoding a Staphylococcus lugdunensis (SluCas9).
[0043] Embodiment 8 is a composition comprising one or more nucleic acid molecules encoding a Staphylococcus aureus Cas9 (SaCas9) and a first and a second guide RNA, wherein the first and the second guide RNAs target different sequences in a DMD gene, wherein the first and the second guide RNAs each comprise a sequence that is at least 90% identical to a first and a second guide sequence selected from any one of the following pairs of first and second guide sequences: SEQ ID NOs: 28 and 57; 31 and 57; 31 and 46; 32 and 69; 33 and 57; 33 and 69; 34 and 57; 36 and 69; 37 and 69; 37 and 46; 39 and 46; 40 and 46; 46 and 35; 46 and 62; 46 and 65; 46 and 67; 47 and 57; 48 and 57; 49 and 57; 51 and 57; 53 and 46; 54 and 46; 55 and 46; 58 and 46; 59 and 46; 60 and 46; 61 and 69; or 69 and 30.
[0044] Embodiment 9 is a composition comprising one or more nucleic acid molecules encoding a Staphylococcus lugdunensis (SluCas9) and a first and a second guide RNA, wherein the first and the second guide RNAs target different sequences in a DMD gene, wherein the first and the second guide RNA each comprise a sequence that is at least 90% identical to a first and a second guide sequence selected from any one of the following pairs of SEQ ID NOs: 243 and 252; 245 and 252; 252 and 253; 252 and 254; 252 and 256; 252 and 257; 252 and 258; 252 and 262; 252 and 264; 252 and 265; or 252 and 266.
[0045] Embodiment 10 is a composition comprising one or more nucleic acid molecules encoding an endonuclease and at least two guide RNAs, wherein the at least two guide RNAs each target a different sequence in a DMD gene, wherein the at least two guide RNAs each comprise a sequence that is at least 90% identical to a first and a second guide sequence selected from any one of the following pairs of SEQ ID NOs: 11 and 12; 11 and 13; 11 and 14; 11 and 15; 12 and 13; 12 and 14; 12 and 15; 13 and 14; 13 and 15; 14 and 15; 27 and 28; 27 and 29; 27 and 30; 27 and 31; 27 and 32; 27 and 33; 27 and 34; 27 and 35; 27 and 36; 27 and 37; 27 and 38; 27 and 39; 27 and 40; 27 and 41; 27 and 42; 27 and 43; 27 and 44; 27 and 45; 27 and 46; 27 and 47; 27 and 48; 27 and 53; 27 and 54; 27 and 55; 27 and 56; 27 and 57; 27 and 58; 27 and 59; 27 and 60; 27 and 61; 27 and 62; 27 and 63; 27 and 64; 27 and 65; 27 and 66; 27 and 67; 27 and 68; 27 and 69; 28 and 29; 28 and 30; 28 and 31; 28 and 32; 28 and 33; 28 and 34; 28 and 35; 28 and 36; 28 and 37; 28 and 38; 28 and 39; 28 and 40; 28 and 41; 28 and 42; 28 and 43; 28 and 44; 28 and 45; 28 and 46; 28 and 47; 28 and 48; 28 and 53; 28 and 54; 28 and 55; 28 and 56; 28 and 57; 28 and 58; 28 and 59; 28 and 60; 28 and 61; 28 and 62; 28 and 63; 28 and 64; 28 and 65; 28 and 66; 28 and 67; 28 and 68; 28 and 69; 29 and 30; 29 and 31; 29 and 32; 29 and 33; 29 and 34; 29 and 35; 29 and 36; 29 and 37; 29 and 38; 29 and 39; 29 and 40; 29 and 41; 29 and 42; 29 and 43; 29 and 44; 29 and 45; 29 and 46; 29 and 47; 29 and 48; 29 and 53; 29 and 54; 29 and 55; 29 and 56; 29 and 57; 29 and 58; 29 and 59; 29 and 60; 29 and 61; 29 and 62; 29 and 63; 29 and 64; 29 and 65; 29 and 66; 29 and 67; 29 and 68; 29 and 69; 30 and 31; 30 and 32; 30 and 33; 30 and 34; 30 and 35; 30 and 36; 30 and 37; 30 and 38; 30 and 39; 30 and 40; 30 and 41; 30 and 42; 30 and 43; 30 and 44; 30 and 45; 30 and 46; 30 and 47; 30 and 48; 30 and 53; 30 and 54; 30 and 55; 30 and 56; 30 and 57; 30 and 58; 30 and 59; 30 and 60; 30 and 61; 30 and 62; 30 and 63; 30 and 64; 30 and 65; 30 and 66; 30 and 67; 30 and 68; 30 and 69; 31 and 32; 31 and 33; 31 and 34; 31 and 35; 31 and 36; 31 and 37; 31 and 38; 31 and 39; 31 and 40; 31 and 41; 31 and 42; 31 and 43; 31 and 44; 31 and 45; 31 and 46; 31 and 47; 31 and 48; 31 and 53; 31 and 54; 31 and 55; 31 and 56; 31 and 57; 31 and 58; 31 and 59; 31 and 60; 31 and 61; 31 and 62; 31 and 63; 31 and 64; 31 and 65; 31 and 66; 31 and 67; 31 and 68; 31 and 69; 32 and 33; 32 and 34; 32 and 35; 32 and 36; 32 and 37; 32 and 38; 32 and 39; 32 and 40; 32 and 41; 32 and 42; 32 and 43; 32 and 44; 32 and 45; 32 and 46; 32 and 47; 32 and 48; 32 and 53; 32 and 54; 32 and 55; 32 and 56; 32 and 57; 32 and 58; 32 and 59; 32 and 60; 32 and 61; 32 and 62; 32 and 63; 32 and 64; 32 and 65; 32 and 66; 32 and 67; 32 and 68; 32 and 69; 33 and 34; 33 and 35; 33 and 36; 33 and 37; 33 and 38; 33 and 39; 33 and 40; 33 and 41; 33 and 42; 33 and 43; 33 and 44; 33 and 45; 33 and 46; 33 and 47; 33 and 48; 33 and 53; 33 and 54; 33 and 55; 33 and 56; 33 and 57; 33 and 58; 33 and 59; 33 and 60; 33 and 61; 33 and 62; 33 and 63; 33 and 64; 33 and 65; 33 and 66; 33 and 67; 33 and 68; 33 and 69; 34 and 35; 34 and 36; 34 and 37; 34 and 38; 34 and 39; 34 and 40; 34 and 41; 34 and 42; 34 and 43; 34 and 44; 34 and 45; 34 and 46; 34 and 47; 34 and 48; 34 and 53; 34 and 54; 34 and 55; 34 and 56; 34 and 57; 34 and 58; 34 and 59; 34 and 60; 34 and 61; 34 and 62; 34 and 63; 34 and 64; 34 and 65; 34 and 66; 34 and 67; 34 and 68; 34 and 69; 35 and 36; 35 and 37; 35 and 38; 35 and 39; 35 and 40; 35 and 41; 35 and 42; 35 and 43; 35 and 44; 35 and 45; 35 and 46; 35 and 47; 35 and 48; 35 and 53; 35 and 54; 35 and 55; 35 and 56; 35 and 57; 35 and 58; 35 and 59; 35 and 60; 35 and 61; 35 and 62; 35 and 63; 35 and 64; 35 and 65; 35 and 66; 35 and 67; 35 and 68; 35 and 69; 36 and 37; 36 and 38; 36 and 39; 36 and 40; 36 and 41; 36 and 42; 36 and 43; 36 and 44; 36 and 45; 36 and 46; 36 and 47; 36 and 48; 36 and 53; 36 and 54; 36 and 55; 36 and 56; 36 and 57; 36 and 58; 36 and 59; 36 and 60; 36 and 61; 36 and 62; 36 and 63; 36 and 64; 36 and 65; 36 and 66; 36 and 67; 36 and 68; 36 and 69; 37 and 38; 37 and 39; 37 and 40; 37 and 41; 37 and 42; 37 and 43; 37 and 44; 37 and 45; 37 and 46; 37 and 47; 37 and 48; 37 and 53; 37 and 54; 37 and 55; 37 and 56; 37 and 57; 37 and 58; 37 and 59; 37 and 60; 37 and 61; 37 and 62; 37 and 63; 37 and 64; 37 and 65; 37 and 66; 37 and 67; 37 and 68; 37 and 69; 38 and 39; 38 and 40; 38 and 41; 38 and 42; 38 and 43; 38 and 44; 38 and 45; 38 and 46; 38 and 47; 38 and 48; 38 and 53; 38 and 54; 38 and 55; 38 and 56; 38 and 57; 38 and 58; 38 and 59; 38 and 60; 38 and 61; 38 and 62; 38 and 63; 38 and 64; 38 and 65; 38 and 66; 38 and 67; 38 and 68; 38 and 69; 39 and 40; 39 and 41; 39 and 42; 39 and 43; 39 and 44; 39 and 45; 39 and 46; 39 and 47; 39 and 48; 39 and 53; 39 and 54; 39 and 55; 39 and 56; 39 and 57; 39 and 58; 39 and 59; 39 and 60; 39 and 61; 39 and 62; 39 and 63; 39 and 64; 39 and 65; 39 and 66; 39 and 67; 39 and 68; 39 and 69; 40 and 41; 40 and 42; 40 and 43; 40 and 44; 40 and 45; 40 and 46; 40 and 47; 40 and 48; 40 and 53; 40 and 54; 40 and 55; 40 and 56; 40 and 57; 40 and 58; 40 and 59; 40 and 60; 40 and 61; 40 and 62; 40 and 63; 40 and 64; 40 and 65; 40 and 66; 40 and 67; 40 and 68; 40 and 69; 41 and 42; 41 and 43; 41 and 44; 41 and 45; 41 and 46; 41 and 47; 41 and 48; 41 and 53; 41 and 54; 41 and 55; 41 and 56; 41 and 57; 41 and 58; 41 and 59; 41 and 60; 41 and 61; 41 and 62; 41 and 63; 41 and 64; 41 and 65; 41 and 66; 41 and 67; 41 and 68; 41 and 69; 42 and 43; 42 and 44; 42 and 45; 42 and 46; 42 and 47; 42 and 48; 42 and 53; 42 and 54; 42 and 55; 42 and 56; 42 and 57; 42 and 58; 42 and 59; 42 and 60; 42 and 61; 42 and 62; 42 and 63; 42 and 64; 42 and 65; 42 and 66; 42 and 67; 42 and 68; 42 and 69; 43 and 44; 43 and 45; 43 and 46; 43 and 47; 43 and 48; 43 and 53; 43 and 54; 43 and 55; 43 and 56; 43 and 57; 43 and 58; 43 and 59; 43 and 60; 43 and 61; 43 and 62; 43 and 63; 43 and 64; 43 and 65; 43 and 66; 43 and 67; 43 and 68; 43 and 69; 44 and 45; 44 and 46; 44 and 47; 44 and 48; 44 and 53; 44 and 54; 44 and 55; 44 and 56; 44 and 57; 44 and 58; 44 and 59; 44 and 60; 44 and 61; 44 and 62; 44 and 63; 44 and 64; 44 and 65; 44 and 66; 44 and 67; 44 and 68; 44 and 69; 45 and 46; 45 and 47; 45 and 48; 45 and 53; 45 and 54; 45 and 55; 45 and 56; 45 and 57; 45 and 58; 45 and 59; 45 and 60; 45 and 61; 45 and 62; 45 and 63; 45 and 64; 45 and 65; 45 and 66; 45 and 67; 45 and 68; 45 and 69; 46 and 47; 46 and 48; 46 and 53; 46 and 54; 46 and 55; 46 and 56; 46 and 57; 46 and 58; 46 and 59; 46 and 60; 46 and 61; 46 and 62; 46 and 63; 46 and 64; 46 and 65; 46 and 66; 46 and 67; 46 and 68; 46 and 69; 47 and 48; 47 and 53; 47 and 54; 47 and 55; 47 and 56; 47 and 57; 47 and 58; 47 and 59; 47 and 60; 47 and 61; 47 and 62; 47 and 63; 47 and 64; 47 and 65; 47 and 66; 47 and 67; 47 and 68; 47 and 69; 48 and 53; 48 and 54; 48 and 55; 48 and 56; 48 and 57; 48 and 58; 48 and 59; 48 and 60; 48 and 61; 48 and 62; 48 and 63; 48 and 64; 48 and 65; 48 and 66; 48 and 67; 48 and 68; 48 and 69; 53 and 54; 53 and 55; 53 and 56; 53 and 57; 53 and 58; 53 and 59; 53 and 60; 53 and 61; 53 and 62; 53 and 63; 53 and 64; 53 and 65; 53 and 66; 53 and 67; 53 and 68; 53 and 69; 54 and 55; 54 and 56; 54 and 57; 54 and 58; 54 and 59; 54 and 60; 54 and 61; 54 and 62; 54 and 63; 54 and 64; 54 and 65; 54 and 66; 54 and 67; 54 and 68; 54 and 69; 55 and 56; 55 and 57; 55 and 58; 55 and 59; 55 and 60; 55 and 61; 55 and 62; 55 and 63; 55 and 64; 55 and 65; 55 and 66; 55 and 67; 55 and 68; 55 and 69; 56 and 57; 56 and 58; 56 and 59; 56 and 60; 56 and 61; 56 and 62; 56 and 63; 56 and 64; 56 and 65; 56 and 66; 56 and 67; 56 and 68; 56 and 69; 57 and 58; 57 and 59; 57 and 60; 57 and 61; 57 and 62; 57 and 63; 57 and 64; 57 and 65; 57 and 66; 57 and 67; 57 and 68; 57 and 69; 58 and 59; 58 and 60; 58 and 61; 58 and 62; 58 and 63; 58 and 64; 58 and 65; 58 and 66; 58 and 67; 58 and 68; 58 and 69; 59 and 60; 59 and 61; 59 and 62; 59 and 63; 59 and 64; 59 and 65; 59 and 66; 59 and 67; 59 and 68; 59 and 69; 60 and 61; 60 and 62; 60 and 63; 60 and 64; 60 and 65; 60 and 66; 60 and 67; 60 and 68; 60 and 69; 61 and 62; 61 and 63; 61 and 64; 61 and 65; 61 and 66; 61 and 67; 61 and 68; 61 and 69; 62 and 63; 62 and 64; 62 and 65; 62 and 66; 62 and 67; 62 and 68; 62 and 69; 63 and 64; 63 and 65; 63 and 66; 63 and 67; 63 and 68; 63 and 69; 64 and 65; 64 and 66; 64 and 67; 64 and 68; 64 and 69; 65 and 66; 65 and 67; 65 and 68; 65 and 69; 66 and 67; 66 and 68; 66 and 69; 67 and 68; 67 and 69; or 68 and 69; and
   [0046] a second nucleic acid encoding a SaCas9.
[0047] Embodiment 11 is a composition comprising one or more nucleic acid molecules encoding an endonuclease and at least two guide RNAs, wherein the at least two guide RNAs each target a different sequence in a DMD gene, wherein the at least two guide RNAs each comprise a sequence that is at least 90% identical to a first and a second guide sequence, wherein the first and the second guide sequences are selected from any one of the following pairs of SEQ ID NOs: 243 and 244; 243 and 245; 243 and 246; 243 and 247; 243 and 248; 243 and 249; 243 and 250; 243 and 251; 243 and 252; 243 and 253; 243 and 254; 243 and 255; 243 and 256; 243 and 257; 243 and 258; 243 and 259; 243 and 260; 243 and 261; 243 and 262; 243 and 263; 243 and 264; 243 and 265; 243 and 266; 243 and 267; 243 and 268; 243 and 269; 244 and 245; 244 and 246; 244 and 247; 244 and 248; 244 and 249; 244 and 250; 244 and 251; 244 and 252; 244 and 253; 244 and 254; 244 and 255; 244 and 256; 244 and 257; 244 and 258; 244 and 259; 244 and 260; 244 and 261; 244 and 262; 244 and 263; 244 and 264; 244 and 265; 244 and 266; 244 and 267; 244 and 268; 244 and 269; 245 and 246; 245 and 247; 245 and 248; 245 and 249; 245 and 250; 245 and 251; 245 and 252; 245 and 253; 245 and 254; 245 and 255; 245 and 256; 245 and 257; 245 and 258; 245 and 259; 245 and 260; 245 and 261; 245 and 262; 245 and 263; 245 and 264; 245 and 265; 245 and 266; 245 and 267; 245 and 268; 245 and 269; 246 and 247; 246 and 248; 246 and 249; 246 and 250; 246 and 251; 246 and 252; 246 and 253; 246 and 254; 246 and 255; 246 and 256; 246 and 257; 246 and 258; 246 and 259; 246 and 260; 246 and 261; 246 and 262; 246 and 263; 246 and 264; 246 and 265; 246 and 266; 246 and 267; 246 and 268; 246 and 269; 247 and 248; 247 and 249; 247 and 250; 247 and 251; 247 and 252; 247 and 253; 247 and 254; 247 and 255; 247 and 256; 247 and 257; 247 and 258; 247 and 259; 247 and 260; 247 and 261; 247 and 262; 247 and 263; 247 and 264; 247 and 265; 247 and 266; 247 and 267; 247 and 268; 247 and 269; 248 and 249; 248 and 250; 248 and 251; 248 and 252; 248 and 253; 248 and 254; 248 and 255; 248 and 256; 248 and 257; 248 and 258; 248 and 259; 248 and 260; 248 and 261; 248 and 262; 248 and 263; 248 and 264; 248 and 265; 248 and 266; 248 and 267; 248 and 268; 248 and 269; 249 and 250; 249 and 251; 249 and 252; 249 and 253; 249 and 254; 249 and 255; 249 and 256; 249 and 257; 249 and 258; 249 and 259; 249 and 260; 249 and 261; 249 and 262; 249 and 263; 249 and 264; 249 and 265; 249 and 266; 249 and 267; 249 and 268; 249 and 269; 250 and 251; 250 and 252; 250 and 253; 250 and 254; 250 and 255; 250 and 256; 250 and 257; 250 and 258; 250 and 259; 250 and 260; 250 and 261; 250 and 262; 250 and 263; 250 and 264; 250 and 265; 250 and 266; 250 and 267; 250 and 268; 250 and 269; 251 and 252; 251 and 253; 251 and 254; 251 and 255; 251 and 256; 251 and 257; 251 and 258; 251 and 259; 251 and 260; 251 and 261; 251 and 262; 251 and 263; 251 and 264; 251 and 265; 251 and 266; 251 and 267; 251 and 268; 251 and 269; 252 and 253; 252 and 254; 252 and 255; 252 and 256; 252 and 257; 252 and 258; 252 and 259; 252 and 260; 252 and 261; 252 and 262; 252 and 263; 252 and 264; 252 and 265; 252 and 266; 252 and 267; 252 and 268; 252 and 269; 253 and 254; 253 and 255; 253 and 256; 253 and 257; 253 and 258; 253 and 259; 253 and 260; 253 and 261; 253 and 262; 253 and 263; 253 and 264; 253 and 265; 253 and 266; 253 and 267; 253 and 268; 253 and 269; 254 and 255; 254 and 256; 254 and 257; 254 and 258; 254 and 259; 254 and 260; 254 and 261; 254 and 262; 254 and 263; 254 and 264; 254 and 265; 254 and 266; 254 and 267; 254 and 268; 254 and 269; 255 and 256; 255 and 257; 255 and 258; 255 and 259; 255 and 260; 255 and 261; 255 and 262; 255 and 263; 255 and 264; 255 and 265; 255 and 266; 255 and 267; 255 and 268; 255 and 269; 256 and 257; 256 and 258; 256 and 259; 256 and 260; 256 and 261; 256 and 262; 256 and 263; 256 and 264; 256 and 265; 256 and 266; 256 and 267; 256 and 268; 256 and 269; 257 and 258; 257 and 259; 257 and 260; 257 and 261; 257 and 262; 257 and 263; 257 and 264; 257 and 265; 257 and 266; 257 and 267; 257 and 268; 257 and 269; 258 and 259; 258 and 260; 258 and 261; 258 and 262; 258 and 263; 258 and 264; 258 and 265; 258 and 266; 258 and 267; 258 and 268; 258 and 269; 259 and 260; 259 and 261; 259 and 262; 259 and 263; 259 and 264; 259 and 265; 259 and 266; 259 and 267; 259 and 268; 259 and 269; 260 and 261; 260 and 262; 260 and 263; 260 and 264; 260 and 265; 260 and 266; 260 and 267; 260 and 268; 260 and 269; 261 and 262; 261 and 263; 261 and 264; 261 and 265; 261 and 266; 261 and 267; 261 and 268; 261 and 269; 262 and 263; 262 and 264; 262 and 265; 262 and 266; 262 and 267; 262 and 268; 262 and 269; 263 and 264; 263 and 265; 263 and 266; 263 and 267; 263 and 268; 263 and 269; 264 and 265; 264 and 266; 264 and 267; 264 and 268; 264 and 269; 265 and 266; 265 and 267; 265 and 268; 265 and 269; 266 and 267; 266 and 268; 266 and 269; 267 and 268; 267 and 269; 268 and 269; and
   [0048] a second nucleic acid encoding a SluCas9.
[0049] Embodiment 12 is a composition comprising a first and a second nucleic acid molecule, wherein the first nucleic acid molecule encodes a Staphylococcus aureus Cas9 (SaCas9) endonuclease and optionally a first or a first and second guide RNA, and the second nucleic acid molecule comprises a first or a first and second guide RNA, wherein the first guide RNA comprises a first sequence and the second guide RNA comprises a second sequence, and wherein the first sequence and the second sequence are selected from any one the following pairs of SEQ ID NOs: 11 and 12; 11 and 13; 11 and 14; 11 and 15; 12 and 13; 12 and 14; 12 and 15; 13 and 14; 13 and 15; 14 and 15; 27 and 28; 27 and 29; 27 and 30; 27 and 31; 27 and 32; 27 and 33; 27 and 34; 27 and 35; 27 and 36; 27 and 37; 27 and 38; 27 and 39; 27 and 40; 27 and 41; 27 and 42; 27 and 43; 27 and 44; 27 and 45; 27 and 46; 27 and 47; 27 and 48; 27 and 53; 27 and 54; 27 and 55; 27 and 56; 27 and 57; 27 and 58; 27 and 59; 27 and 60; 27 and 61; 27 and 62; 27 and 63; 27 and 64; 27 and 65; 27 and 66; 27 and 67; 27 and 68; 27 and 69; 28 and 29; 28 and 30; 28 and 31; 28 and 32; 28 and 33; 28 and 34; 28 and 35; 28 and 36; 28 and 37; 28 and 38; 28 and 39; 28 and 40; 28 and 41; 28 and 42; 28 and 43; 28 and 44; 28 and 45; 28 and 46; 28 and 47; 28 and 48; 28 and 53; 28 and 54; 28 and 55; 28 and 56; 28 and 57; 28 and 58; 28 and 59; 28 and 60; 28 and 61; 28 and 62; 28 and 63; 28 and 64; 28 and 65; 28 and 66; 28 and 67; 28 and 68; 28 and 69; 29 and 30; 29 and 31; 29 and 32; 29 and 33; 29 and 34; 29 and 35; 29 and 36; 29 and 37; 29 and 38; 29 and 39; 29 and 40; 29 and 41; 29 and 42; 29 and 43; 29 and 44; 29 and 45; 29 and 46; 29 and 47; 29 and 48; 29 and 53; 29 and 54; 29 and 55; 29 and 56; 29 and 57; 29 and 58; 29 and 59; 29 and 60; 29 and 61; 29 and 62; 29 and 63; 29 and 64; 29 and 65; 29 and 66; 29 and 67; 29 and 68; 29 and 69; 30 and 31; 30 and 32; 30 and 33; 30 and 34; 30 and 35; 30 and 36; 30 and 37; 30 and 38; 30 and 39; 30 and 40; 30 and 41; 30 and 42; 30 and 43; 30 and 44; 30 and 45; 30 and 46; 30 and 47; 30 and 48; 30 and 53; 30 and 54; 30 and 55; 30 and 56; 30 and 57; 30 and 58; 30 and 59; 30 and 60; 30 and 61; 30 and 62; 30 and 63; 30 and 64; 30 and 65; 30 and 66; 30 and 67; 30 and 68; 30 and 69; 31 and 32; 31 and 33; 31 and 34; 31 and 35; 31 and 36; 31 and 37; 31 and 38; 31 and 39; 31 and 40; 31 and 41; 31 and 42; 31 and 43; 31 and 44; 31 and 45; 31 and 46; 31 and 47; 31 and 48; 31 and 53; 31 and 54; 31 and 55; 31 and 56; 31 and 57; 31 and 58; 31 and 59; 31 and 60; 31 and 61; 31 and 62; 31 and 63; 31 and 64; 31 and 65; 31 and 66; 31 and 67; 31 and 68; 31 and 69; 32 and 33; 32 and 34; 32 and 35; 32 and 36; 32 and 37; 32 and 38; 32 and 39; 32 and 40; 32 and 41; 32 and 42; 32 and 43; 32 and 44; 32 and 45; 32 and 46; 32 and 47; 32 and 48; 32 and 53; 32 and 54; 32 and 55; 32 and 56; 32 and 57; 32 and 58; 32 and 59; 32 and 60; 32 and 61; 32 and 62; 32 and 63; 32 and 64; 32 and 65; 32 and 66; 32 and 67; 32 and 68; 32 and 69; 33 and 34; 33 and 35; 33 and 36; 33 and 37; 33 and 38; 33 and 39; 33 and 40; 33 and 41; 33 and 42; 33 and 43; 33 and 44; 33 and 45; 33 and 46; 33 and 47; 33 and 48; 33 and 53; 33 and 54; 33 and 55; 33 and 56; 33 and 57; 33 and 58; 33 and 59; 33 and 60; 33 and 61; 33 and 62; 33 and 63; 33 and 64; 33 and 65; 33 and 66; 33 and 67; 33 and 68; 33 and 69; 34 and 35; 34 and 36; 34 and 37; 34 and 38; 34 and 39; 34 and 40; 34 and 41; 34 and 42; 34 and 43; 34 and 44; 34 and 45; 34 and 46; 34 and 47; 34 and 48; 34 and 53; 34 and 54; 34 and 55; 34 and 56; 34 and 57; 34 and 58; 34 and 59; 34 and 60; 34 and 61; 34 and 62; 34 and 63; 34 and 64; 34 and 65; 34 and 66; 34 and 67; 34 and 68; 34 and 69; 35 and 36; 35 and 37; 35 and 38; 35 and 39; 35 and 40; 35 and 41; 35 and 42; 35 and 43; 35 and 44; 35 and 45; 35 and 46; 35 and 47; 35 and 48; 35 and 53; 35 and 54; 35 and 55; 35 and 56; 35 and 57; 35 and 58; 35 and 59; 35 and 60; 35 and 61; 35 and 62; 35 and 63; 35 and 64; 35 and 65; 35 and 66; 35 and 67; 35 and 68; 35 and 69; 36 and 37; 36 and 38; 36 and 39; 36 and 40; 36 and 41; 36 and 42; 36 and 43; 36 and 44; 36 and 45; 36 and 46; 36 and 47; 36 and 48; 36 and 53; 36 and 54; 36 and 55; 36 and 56; 36 and 57; 36 and 58; 36 and 59; 36 and 60; 36 and 61; 36 and 62; 36 and 63; 36 and 64; 36 and 65; 36 and 66; 36 and 67; 36 and 68; 36 and 69; 37 and 38; 37 and 39; 37 and 40; 37 and 41; 37 and 42; 37 and 43; 37 and 44; 37 and 45; 37 and 46; 37 and 47; 37 and 48; 37 and 53; 37 and 54; 37 and 55; 37 and 56; 37 and 57; 37 and 58; 37 and 59; 37 and 60; 37 and 61; 37 and 62; 37 and 63; 37 and 64; 37 and 65; 37 and 66; 37 and 67; 37 and 68; 37 and 69; 38 and 39; 38 and 40; 38 and 41; 38 and 42; 38 and 43; 38 and 44; 38 and 45; 38 and 46; 38 and 47; 38 and 48; 38 and 53; 38 and 54; 38 and 55; 38 and 56; 38 and 57; 38 and 58; 38 and 59; 38 and 60; 38 and 61; 38 and 62; 38 and 63; 38 and 64; 38 and 65; 38 and 66; 38 and 67; 38 and 68; 38 and 69; 39 and 40; 39 and 41; 39 and 42; 39 and 43; 39 and 44; 39 and 45; 39 and 46; 39 and 47; 39 and 48; 39 and 53; 39 and 54; 39 and 55; 39 and 56; 39 and 57; 39 and 58; 39 and 59; 39 and 60; 39 and 61; 39 and 62; 39 and 63; 39 and 64; 39 and 65; 39 and 66; 39 and 67; 39 and 68; 39 and 69; 40 and 41; 40 and 42; 40 and 43; 40 and 44; 40 and 45; 40 and 46; 40 and 47; 40 and 48; 40 and 53; 40 and 54; 40 and 55; 40 and 56; 40 and 57; 40 and 58; 40 and 59; 40 and 60; 40 and 61; 40 and 62; 40 and 63; 40 and 64; 40 and 65; 40 and 66; 40 and 67; 40 and 68; 40 and 69; 41 and 42; 41 and 43; 41 and 44; 41 and 45; 41 and 46; 41 and 47; 41 and 48; 41 and 53; 41 and 54; 41 and 55; 41 and 56; 41 and 57; 41 and 58; 41 and 59; 41 and 60; 41 and 61; 41 and 62; 41 and 63; 41 and 64; 41 and 65; 41 and 66; 41 and 67; 41 and 68; 41 and 69; 42 and 43; 42 and 44; 42 and 45; 42 and 46; 42 and 47; 42 and 48; 42 and 53; 42 and 54; 42 and 55; 42 and 56; 42 and 57; 42 and 58; 42 and 59; 42 and 60; 42 and 61; 42 and 62; 42 and 63; 42 and 64; 42 and 65; 42 and 66; 42 and 67; 42 and 68; 42 and 69; 43 and 44; 43 and 45; 43 and 46; 43 and 47; 43 and 48; 43 and 53; 43 and 54; 43 and 55; 43 and 56; 43 and 57; 43 and 58; 43 and 59; 43 and 60; 43 and 61; 43 and 62; 43 and 63; 43 and 64; 43 and 65; 43 and 66; 43 and 67; 43 and 68; 43 and 69; 44 and 45; 44 and 46; 44 and 47; 44 and 48; 44 and 53; 44 and 54; 44 and 55; 44 and 56; 44 and 57; 44 and 58; 44 and 59; 44 and 60; 44 and 61; 44 and 62; 44 and 63; 44 and 64; 44 and 65; 44 and 66; 44 and 67; 44 and 68; 44 and 69; 45 and 46; 45 and 47; 45 and 48; 45 and 53; 45 and 54; 45 and 55; 45 and 56; 45 and 57; 45 and 58; 45 and 59; 45 and 60; 45 and 61; 45 and 62; 45 and 63; 45 and 64; 45 and 65; 45 and 66; 45 and 67; 45 and 68; 45 and 69; 46 and 47; 46 and 48; 46 and 53; 46 and 54; 46 and 55; 46 and 56; 46 and 57; 46 and 58; 46 and 59; 46 and 60; 46 and 61; 46 and 62; 46 and 63; 46 and 64; 46 and 65; 46 and 66; 46 and 67; 46 and 68; 46 and 69; 47 and 48; 47 and 53; 47 and 54; 47 and 55; 47 and 56; 47 and 57; 47 and 58; 47 and 59; 47 and 60; 47 and 61; 47 and 62; 47 and 63; 47 and 64; 47 and 65; 47 and 66; 47 and 67; 47 and 68; 47 and 69; 48 and 53; 48 and 54; 48 and 55; 48 and 56; 48 and 57; 48 and 58; 48 and 59; 48 and 60; 48 and 61; 48 and 62; 48 and 63; 48 and 64; 48 and 65; 48 and 66; 48 and 67; 48 and 68; 48 and 69; 53 and 54; 53 and 55; 53 and 56; 53 and 57; 53 and 58; 53 and 59; 53 and 60; 53 and 61; 53 and 62; 53 and 63; 53 and 64; 53 and 65; 53 and 66; 53 and 67; 53 and 68; 53 and 69; 54 and 55; 54 and 56; 54 and 57; 54 and 58; 54 and 59; 54 and 60; 54 and 61; 54 and 62; 54 and 63; 54 and 64; 54 and 65; 54 and 66; 54 and 67; 54 and 68; 54 and 69; 55 and 56; 55 and 57; 55 and 58; 55 and 59; 55 and 60; 55 and 61; 55 and 62; 55 and 63; 55 and 64; 55 and 65; 55 and 66; 55 and 67; 55 and 68; 55 and 69; 56 and 57; 56 and 58; 56 and 59; 56 and 60; 56 and 61; 56 and 62; 56 and 63; 56 and 64; 56 and 65; 56 and 66; 56 and 67; 56 and 68; 56 and 69; 57 and 58; 57 and 59; 57 and 60; 57 and 61; 57 and 62; 57 and 63; 57 and 64; 57 and 65; 57 and 66; 57 and 67; 57 and 68; 57 and 69; 58 and 59; 58 and 60; 58 and 61; 58 and 62; 58 and 63; 58 and 64; 58 and 65; 58 and 66; 58 and 67; 58 and 68; 58 and 69; 59 and 60; 59 and 61; 59 and 62; 59 and 63; 59 and 64; 59 and 65; 59 and 66; 59 and 67; 59 and 68; 59 and 69; 60 and 61; 60 and 62; 60 and 63; 60 and 64; 60 and 65; 60 and 66; 60 and 67; 60 and 68; 60 and 69; 61 and 62; 61 and 63; 61 and 64; 61 and 65; 61 and 66; 61 and 67; 61 and 68; 61 and 69; 62 and 63; 62 and 64; 62 and 65; 62 and 66; 62 and 67; 62 and 68; 62 and 69; 63 and 64; 63 and 65; 63 and 66; 63 and 67; 63 and 68; 63 and 69; 64 and 65; 64 and 66; 64 and 67; 64 and 68; 64 and 69; 65 and 66; 65 and 67; 65 and 68; 65 and 69; 66 and 67; 66 and 68; 66 and 69; 67 and 68; 67 and 69; 68 and 69.
[0050] Embodiment 13 is a composition comprising a first and a second nucleic acid molecule, wherein the first nucleic acid molecule encodes a Staphylococcus lugdunensis (SluCas9) endonuclease and optionally a first or a first and second guide RNA, and the second nucleic acid molecule comprises a first or a first and second guide RNA, wherein the first guide RNA comprises a first sequence and the second guide RNA comprises a second sequence, and wherein the first sequence and the sequence are selected from any one the following pairs of SEQ ID NOs: 243 and 244; 243 and 245; 243 and 246; 243 and 247; 243 and 248; 243 and 249; 243 and 250; 243 and 251; 243 and 252; 243 and 253; 243 and 254; 243 and 255; 243 and 256; 243 and 257; 243 and 258; 243 and 259; 243 and 260; 243 and 261; 243 and 262; 243 and 263; 243 and 264; 243 and 265; 243 and 266; 243 and 267; 243 and 268; 243 and 269; 244 and 245; 244 and 246; 244 and 247; 244 and 248; 244 and 249; 244 and 250; 244 and 251; 244 and 252; 244 and 253; 244 and 254; 244 and 255; 244 and 256; 244 and 257; 244 and 258; 244 and 259; 244 and 260; 244 and 261; 244 and 262; 244 and 263; 244 and 264; 244 and 265; 244 and 266; 244 and 267; 244 and 268; 244 and 269; 245 and 246; 245 and 247; 245 and 248; 245 and 249; 245 and 250; 245 and 251; 245 and 252; 245 and 253; 245 and 254; 245 and 255; 245 and 256; 245 and 257; 245 and 258; 245 and 259; 245 and 260; 245 and 261; 245 and 262; 245 and 263; 245 and 264; 245 and 265; 245 and 266; 245 and 267; 245 and 268; 245 and 269; 246 and 247; 246 and 248; 246 and 249; 246 and 250; 246 and 251; 246 and 252; 246 and 253; 246 and 254; 246 and 255; 246 and 256; 246 and 257; 246 and 258; 246 and 259; 246 and 260; 246 and 261; 246 and 262; 246 and 263; 246 and 264; 246 and 265; 246 and 266; 246 and 267; 246 and 268; 246 and 269; 247 and 248; 247 and 249; 247 and 250; 247 and 251; 247 and 252; 247 and 253; 247 and 254; 247 and 255; 247 and 256; 247 and 257; 247 and 258; 247 and 259; 247 and 260; 247 and 261; 247 and 262; 247 and 263; 247 and 264; 247 and 265; 247 and 266; 247 and 267; 247 and 268; 247 and 269; 248 and 249; 248 and 250; 248 and 251; 248 and 252; 248 and 253; 248 and 254; 248 and 255; 248 and 256; 248 and 257; 248 and 258; 248 and 259; 248 and 260; 248 and 261; 248 and 262; 248 and 263; 248 and 264; 248 and 265; 248 and 266; 248 and 267; 248 and 268; 248 and 269; 249 and 250; 249 and 251; 249 and 252; 249 and 253; 249 and 254; 249 and 255; 249 and 256; 249 and 257; 249 and 258; 249 and 259; 249 and 260; 249 and 261; 249 and 262; 249 and 263; 249 and 264; 249 and 265; 249 and 266; 249 and 267; 249 and 268; 249 and 269; 250 and 251; 250 and 252; 250 and 253; 250 and 254; 250 and 255; 250 and 256; 250 and 257; 250 and 258; 250 and 259; 250 and 260; 250 and 261; 250 and 262; 250 and 263; 250 and 264; 250 and 265; 250 and 266; 250 and 267; 250 and 268; 250 and 269; 251 and 252; 251 and 253; 251 and 254; 251 and 255; 251 and 256; 251 and 257; 251 and 258; 251 and 259; 251 and 260; 251 and 261; 251 and 262; 251 and 263; 251 and 264; 251 and 265; 251 and 266; 251 and 267; 251 and 268; 251 and 269; 252 and 253; 252 and 254; 252 and 255; 252 and 256; 252 and 257; 252 and 258; 252 and 259; 252 and 260; 252 and 261; 252 and 262; 252 and 263; 252 and 264; 252 and 265; 252 and 266; 252 and 267; 252 and 268; 252 and 269; 253 and 254; 253 and 255; 253 and 256; 253 and 257; 253 and 258; 253 and 259; 253 and 260; 253 and 261; 253 and 262; 253 and 263; 253 and 264; 253 and 265; 253 and 266; 253 and 267; 253 and 268; 253 and 269; 254 and 255; 254 and 256; 254 and 257; 254 and 258; 254 and 259; 254 and 260; 254 and 261; 254 and 262; 254 and 263; 254 and 264; 254 and 265; 254 and 266; 254 and 267; 254 and 268; 254 and 269; 255 and 256; 255 and 257; 255 and 258; 255 and 259; 255 and 260; 255 and 261; 255 and 262; 255 and 263; 255 and 264; 255 and 265; 255 and 266; 255 and 267; 255 and 268; 255 and 269; 256 and 257; 256 and 258; 256 and 259; 256 and 260; 256 and 261; 256 and 262; 256 and 263; 256 and 264; 256 and 265; 256 and 266; 256 and 267; 256 and 268; 256 and 269; 257 and 258; 257 and 259; 257 and 260; 257 and 261; 257 and 262; 257 and 263; 257 and 264; 257 and 265; 257 and 266; 257 and 267; 257 and 268; 257 and 269; 258 and 259; 258 and 260; 258 and 261; 258 and 262; 258 and 263; 258 and 264; 258 and 265; 258 and 266; 258 and 267; 258 and 268; 258 and 269; 259 and 260; 259 and 261; 259 and 262; 259 and 263; 259 and 264; 259 and 265; 259 and 266; 259 and 267; 259 and 268; 259 and 269; 260 and 261; 260 and 262; 260 and 263; 260 and 264; 260 and 265; 260 and 266; 260 and 267; 260 and 268; 260 and 269; 261 and 262; 261 and 263; 261 and 264; 261 and 265; 261 and 266; 261 and 267; 261 and 268; 261 and 269; 262 and 263; 262 and 264; 262 and 265; 262 and 266; 262 and 267; 262 and 268; 262 and 269; 263 and 264; 263 and 265; 263 and 266; 263 and 267; 263 and 268; 263 and 269; 264 and 265; 264 and 266; 264 and 267; 264 and 268; 264 and 269; 265 and 266; 265 and 267; 265 and 268; 265 and 269; 266 and 267; 266 and 268; 266 and 269; 267 and 268; 267 and 269; 268 and 269.
[0051] Embodiment 14 is the composition of any one of the preceding embodiments, comprising at least two guide RNAs, wherein once expressed in vitro or in vivo in combination with an RNA-guided endonuclease, the at least two guide RNAs excise a portion of an exon, wherein the size of the excised portion of the exon is between 5 and 250 nucleotides in length.
[0052] Embodiment 15 is the composition of any one of the preceding embodiments, comprising at least two guide RNAs, wherein once expressed in vitro or in vivo in combination with an RNA-guided endonuclease, the at least two guide RNAs excise a portion of an exon, wherein the size of the excised portion of the exon is between 5 and 250, 5 and 200, 5 and 150, 5 and 100, 5 and 75, 5 and 50, 5 and 25, 5 and 10, 20 and 250, 20 and 200, 20 and 150, 20 and 100, 20 and 75, 20 and 50, 20 and 25, 50 and 250, 50 and 200, 50 and 150, 50 and 100, and 50 and 75 nucleotides.
[0053] Embodiment 16 is the composition of any one of the preceding embodiments, comprising at least two guide RNAs, wherein once expressed in vitro or in vivo in combination with an RNA-guided endonuclease, the at least two guide RNAs excise a portion of the exon, wherein the size of the excised portion of the exon is between 8 and 167 nucleotides.
[0054] Embodiment 17 is the composition of any one of the preceding embodiments, comprising at least two guide RNAs, wherein once expressed in vitro or in vivo in combination with an RNA-guided endonuclease, the at least two guide RNAs facilitate a 3n+1 edit, wherein “n” is any negative whole number (e.g., any whole number between −10 and −75).
[0055] Embodiment 18 is the composition of any one of the preceding embodiments, comprising at least two guide RNAs, wherein once expressed in vitro or in vivo in combination with an RNA-guided endonuclease, the at least two guide RNAs are capable of excising a nucleic acid that is at least 26, 29, 32, 35, 38, 41, 44, 47, 50, 53, 56, 59, 62, 65, 68, 71, 74, 77, 80, 83, 86, 89, 92, 95, 98, 101, 104, 107, 110, 113, 116, 119, 122, 125, 128, 131, 134, 137, 140, 143, 146, 149, 152, 155, 158, 161, 164, 167, 170, 173, 176, 179, 182, 185, 188, 191, 194, 197, 200, 203, 206, 209, 212, 215, or 218 nucleotides in length.
[0056] Embodiment 19 is the composition of any one of the preceding embodiments, comprising at least two guide RNAs, wherein one of the guide RNAs comprises the sequence of SEQ ID NO: 269 and another guide RNA comprises the sequence of SEQ ID Nos: 247 or 249.
[0057] Embodiment 20 is the composition of any one of the preceding embodiments, comprising at least two guide RNAs, wherein one of the guide RNAs comprises the sequence of SEQ ID NO: 252 and another guide RNA comprises the sequence of SEQ ID Nos: 262, 264, or 254.
[0058] Embodiment 21 is the composition of any one of the preceding embodiments, wherein the one or more guide RNAs is an sgRNA.
[0059] Embodiment 22 is the composition of any one of the preceding embodiments, wherein the one or more guide RNAs is modified.
[0060] Embodiment 23 is the composition of any one of the preceding embodiments, wherein the one or more guide RNAs or nucleic acids is in a vector.
[0061] Embodiment 24 is the composition of embodiment 23, wherein the vector is a viral vector.
[0062] Embodiment 25 is the composition of embodiment 24, wherein the viral vector is an AAV vector.
[0063] Embodiment 26 is the composition of embodiment 25, wherein the AAV vector is an AAV9 vector.
[0064] Embodiment 27 is the composition of any one of the preceding embodiments, wherein the promoter for the one or more guide RNAs is hU6c.
[0065] Embodiment 28 is the composition of any one of the preceding embodiments, wherein the one or more guide RNAs is a guide RNA for SaCas9, and the one or more guide RNAs comprises a scaffold comprising the sequence of SEQ ID NO: 504.
[0066] Embodiment 29 is the composition of any one of the preceding embodiments, wherein the one or more guide RNAs is a guide RNA for SluCas9, and the one or more guide RNAs comprises a scaffold comprising the sequence of SEQ ID NO: 901.
[0067] Embodiment 30 is the composition of any one of the preceding embodiments, wherein the Cas9 is a SluCas9 comprising an amino acid sequence that is at least 80%, 85%, 90%, 91%, 92%, 93%, 94%, 95%, 96%, 97%, 98%, 99%, or 100% identical to the sequence of SEQ ID NO: 712.
[0068] Embodiment 31 is the composition of any one of the preceding embodiments, wherein the one or more guide RNAs is in an AAV vector, wherein the vector comprises from 5′ to 3′ with respect to the plus strand: the reverse complement of a first guide RNA scaffold sequence, the reverse complement of a nucleic acid encoding a first guide RNA guide sequence, the reverse complement of a promoter for expression of the nucleic acid encoding the first guide RNA, a promoter for expression of a nucleic acid encoding SaCas9 or SluCas9 (e.g., CK8e), a nucleic acid encoding a SaCas9 or SluCas9, a polyadenylation sequence, a promoter for expression of a second sgRNA in the same direction as the promoter for SaCas9 or SluCas9, a second sgRNA guide sequence, and a second sgRNA scaffold sequence.
[0069] Embodiment 32 is the composition of embodiment 31, wherein:
   [0070] i) the first guide RNA guide sequence comprises the sequence of SEQ ID NO: 269, and the second guide RNA guide sequence comprises the sequence of SEQ ID NO: 247 or 269; or
   [0071] ii) the first guide RNA guide sequence comprises the sequence of SEQ ID NO: 252, and the second guide RNA guide sequence comprises the sequence of SEQ ID NO: 262, 264, or 254.
[0072] Embodiment 33 is a method of treating Duchenne Muscular Dystrophy (DMD), the method comprising delivering to a cell the composition of any one of embodiments 1-32.
[0073] Embodiment 34 is a method of excising a portion of the DMD gene, the method comprising delivering to a cell the composition of any one of embodiments 1-32, wherein the size of the excised portion is less than about 250 nucleotides.

### DESCRIPTION OF FIGURES

[0074] FIG. 1 shows editing frequency and indel profiles of selected SaCas9, SaCas9-KKH and SluCas9 sgRNA pairs targeting Exon 51 of the DMD gene in HEK293FT cells. Each stack bar represents a sgRNA pair and the bar height depicts the average frequency of the total edit. Different indel profiles for each pair of sgRNAs are represented by using distinct patterns as shown in the key. Error bar denotes the standard deviation for each indel group. The “Guide IDs” in the figure are shown as numbers only and generally correspond to the last digit in the “Guide RNA Name” column of Table 2 for each provided Cas9 type. “RF+1” means a refraining edit by insertion of a single nucleotide. “RF Other” means other refraining edits. “Exon Skipping” means 1) indels overlap with the splice acceptor (AG) (5′-end of the target exon); 2) deletion with >9-nt overlap with the splicing window at one of the two guides; or 3) insertion at the exact GT/AG splicing sites and with length ≥9-nt at one of the two guides.

[0075] FIGS. 2A and 2B show editing frequency and indel profile of selected SaCas9 and SluCas9 sgRNA pairs targeting Exon 45 or Exon 51 of the DMD gene in Human Skeletal Muscle Myoblasts (HsMM) cells. Each stack bar represents a sgRNA pair and the bar height depicts the average frequency of the total edit. Different indel profiles for each pair of sgRNAs are represented by using distinct patterns. FIG. 2A shows editing frequency and profile as calculated by Inference of CRISPR Edit (ICE) via Sanger sequencing signal decomposition. FIG. 2B shows editing frequency and profile as calculated by next generation sequencing (NGS). NA denotes data not available due to the failed QC at the step of analysis. Error bars denote the standard deviation for each indel group. The “Guide IDs” in the figure are shown as numbers only and generally correspond to the last digit in the “Guide RNA Name” column of Table 2 for each provided Cas9 type. “RF+1” means a refraining edit by insertion of a single nucleotide. “RF Other” means other refraining edits. “Exon Skipping” means 1) indels overlap with the splice acceptor (AG) (5′-end of the target exon); 2) deletion with >9-nt overlap with the splicing window at one of the two guides; or 3) insertion at the exact GT/AG splicing sites and with length ≥9-nt at one of the two guides.

[0076] FIG. 3 is a schematic showing four representative vector designs. White arrows indicate directionality of expression of the sgRNA(s), while the black arrows indicate directionality of the Cas9 protein. In a particular embodiment, the Cas9 promoter may be CK8e. “Pol III” refers to a representative promoter for the expression of sgRNAs, “g1” and “g2” each refer to a guide sequence, “scaffold” refers to the scaffold of a guide RNA, and “pa” refers to a polyadenylation sequence.

[0077] FIGS. 4A and 4B show editing frequency and indel profile of selected SluCas9 sgRNA pairs targeting Exon 45 or Exon 51 of the DMD gene in HsMM cells. Each stack bar represents a sgRNA pair and the bar height depicts the average frequency of the total edit. Different indel profiles for each pair of sgRNAs are represented by using distinct patterns. FIG. 4A shows editing frequency and profile as calculated by next generation sequencing (NGS) for the guide pairs, where E51Slu31 is targeting the refraining window of Exon 51 of the DMD gene. FIG. 4B shows editing frequency and profile as calculated by next generation sequencing (NGS) for the guide pairs, where E51Slu10 is targeting the refraining window of Exon 51 of the DMD gene. Error bars denote the standard deviation for each indel group. The “Guide IDs” in the figure are shown as numbers only and generally correspond to the last digit in the “Guide RNA Name” column of Table 2 for each provided Cas9 type. “RF Other” means other refraining edits.

[0078] FIGS. 5A and 5B show editing frequency and indel profile of selected SluCas9 sgRNA pairs targeting various exons of the DMD gene in HsMM cells. FIG. 5A shows editing frequency and indel profile of selected SluCas9 sgRNA pairs targeting Exon 51 of the DMD gene in HsMM cells. FIG. 5B shows editing frequency and indel profile of selected SluCas9 sgRNA pairs targeting Exon 45 or Exon 51 of the DMD gene in HsMM cells. In FIGS. 5A and 5B, each stack bar represents a sgRNA pair and the bar height depicts the average frequency of the total edit. Different indel profiles for each pair of sgRNAs are represented by using distinct patterns. Editing frequencies and profiles are as calculated by next generation sequencing (NGS) for three guide pairs, in three doses of RNP; high (H), medium (M), and low (L). Error bars denote the standard deviation for each indel group. The “Guide IDs” in the figures are shown as numbers only and generally correspond to the last digit in the “Guide RNA Name” column of Table 2 for each provided Cas9 type. “RF Other” means other refraining edits.

[0079] FIGS. 6A and 6B show editing frequency and indel profile of selected SluCas9 sgRNA pairs targeting Exon 45 or Exon 51 of the DMD gene in HsMM cells. Each stack bar represents a sgRNA pair and the bar height depicts the average frequency of the total edit. Different indel profiles for each pair of sgRNAs are represented by using distinct patterns. FIG. 6A shows editing frequency and profile as calculated by next generation sequencing (NGS) for the E51Slu10 and E51Slu16 guide pair, where ribonucleoprotein (RNP) stoichiometry varies across the sample set.

[0080] FIG. 6B shows editing frequency and profile as calculated by next generation sequencing (NGS) for the E51Slu10 and E51Slu26 guide pair, where ribonucleoprotein (RNP) stoichiometry varies across the sample set. Error bars denote the standard deviation for each indel group. The “Guide IDs” in the figure are shown as numbers only and generally correspond to the last digit in the “Guide RNA Name” column of Table 2 for each provided Cas9 type. “RF Other” means other reframing edits.

### DETAILED DESCRIPTION

[0081] Reference will now be made in detail to certain embodiments of the invention, examples of which are illustrated in the accompanying drawings. While the invention is described in conjunction with the illustrated embodiments, it will be understood that they are not intended to limit the invention to those embodiments. On the contrary, the invention is intended to cover all alternatives, modifications, and equivalents, which may be included within the invention as defined by the appended claims and included embodiments.

[0082] Before describing the present teachings in detail, it is to be understood that the disclosure is not limited to specific compositions or process steps, as such may vary. It should be noted that, as used in this specification and the appended claims, the singular form “a”, “an” and “the” include plural references unless the context clearly dictates otherwise. Thus, for example, reference to “a guide” includes a plurality of guides and reference to “a cell” includes a plurality of cells and the like.

[0083] Numeric ranges are inclusive of the numbers defining the range. Measured and measurable values are understood to be approximate, taking into account significant digits and the error associated with the measurement. Also, the use of “comprise”, “comprises”, “comprising”, “contain”, “contains”, “containing”, “include”, “includes”, and “including” are not intended to be limiting. It is to be understood that both the foregoing general description and detailed description are exemplary and explanatory only and are not restrictive of the teachings.

[0084] Unless specifically noted in the specification, embodiments in the specification that recite “comprising” various components are also contemplated as “consisting of” or “consisting essentially of” the recited components; embodiments in the specification that recite “consisting of” various components are also contemplated as “comprising” or “consisting essentially of” the recited components; and embodiments in the specification that recite “consisting essentially of” various components are also contemplated as “consisting of” or “comprising” the recited components (this interchangeability does not apply to the use of these terms in the claims). The term “or” is used in an inclusive sense, i.e., equivalent to “and/or,” unless the context clearly indicates otherwise.

[0085] The section headings used herein are for organizational purposes only and are not to be construed as limiting the desired subject matter in any way. In the event that any material incorporated by reference contradicts any term defined in this specification or any other express content of this specification, this specification controls. While the present teachings are described in conjunction with various embodiments, it is not intended that the present teachings be limited to such embodiments. On the contrary, the present teachings encompass various alternatives, modifications, and equivalents, as will be appreciated by those of skill in the art.

### I. Definitions

[0086] Unless stated otherwise, the following terms and phrases as used herein are intended to have the following meanings:

[0087] “Polynucleotide,” “nucleic acid,” and “nucleic acid molecule,” are used herein to refer to a multimeric compound comprising nucleosides or nucleoside analogs which have nitrogenous heterocyclic bases or base analogs linked together along a backbone, including conventional RNA, DNA, mixed RNA-DNA, and polymers that are analogs thereof. A nucleic acid “backbone” can be made up of a variety of linkages, including one or more of sugar-phosphodiester linkages, peptide-nucleic acid bonds (“peptide nucleic acids” or PNA; PCT No. WO 95/32305), phosphorothioate linkages, methylphosphonate linkages, or combinations thereof. Sugar moieties of a nucleic acid can be ribose, deoxyribose, or similar compounds with substitutions, e.g., 2′ methoxy or 2′ halide substitutions. Nitrogenous bases can be conventional bases (A, G, C, T, U), analogs thereof (e.g., modified uridines such as 5-methoxyuridine, pseudouridine, or N1-methylpseudouridine, or others); inosine; derivatives of purines or pyrimidines (e.g., N⁴-methyl deoxyguanosine, deaza- or aza-purines, deaza- or aza-pyrimidines, pyrimidine bases with substituent groups at the 5 or 6 position (e.g., 5-methylcytosine), purine bases with a substituent at the 2, 6, or 8 positions, 2-amino-6-methylaminopurine, O⁶-methylguanine, 4-thio-pyrimidines, 4-amino-pyrimidines, 4-dimethylhydrazine-pyrimidines, and O⁴-alkyl-pyrimidines; U.S. Pat. No. 5,378,825 and PCT No. WO 93/13121). For general discussion see The Biochemistry of the Nucleic Acids 5-36, Adams et al., ed., 11^{th} ed., 1992). Nucleic acids can include one or more “abasic” residues where the backbone includes no nitrogenous base for position(s) of the polymer (U.S. Pat. No. 5,585,481). A nucleic acid can comprise only conventional RNA or DNA sugars, bases and linkages, or can include both conventional components and substitutions (e.g., conventional bases with 2′ methoxy linkages, or polymers containing both conventional bases and one or more base analogs). Nucleic acid includes “locked nucleic acid” (LNA), an analogue containing one or more LNA nucleotide monomers with a bicyclic furanose unit locked in an RNA mimicking sugar conformation, which enhance hybridization affinity toward complementary RNA and DNA sequences (Vester and Wengel, 2004, Biochemistry 43(42):13233-41). RNA and DNA have different sugar moieties and can differ by the presence of uracil or analogs thereof in RNA and thymine or analogs thereof in DNA.

[0088] “Guide RNA”, and simply “guide” are used herein interchangeably to refer to either a crRNA (also known as CRISPR RNA), or the combination of a crRNA and a trRNA (also known as tracrRNA). The crRNA and trRNA may be associated as a single RNA molecule (single guide RNA, sgRNA) or in two separate RNA molecules (dual guide RNA, dgRNA). “Guide RNA” refers to each type. The trRNA may be a naturally-occurring sequence, or a trRNA sequence with modifications or variations compared to naturally-occurring sequences. For clarity, the terms “guide RNA” or “guide” as used herein, and unless specifically stated otherwise, may refer to an RNA molecule (comprising A, C, G, and U nucleotides) or to a DNA molecule encoding such an RNA molecule (comprising A, C, G, and T nucleotides) or complementary sequences thereof. In general, in the case of a DNA nucleic acid construct encoding a guide RNA, the U residues in any of the RNA sequences described herein may be replaced with T residues, and in the case of a guide RNA construct encoded by any of the DNA sequences described herein, the T residues may be replaced with U residues.

[0089] As used herein, a “spacer sequence,” sometimes also referred to herein and in the literature as a “spacer,” “protospacer,” “guide sequence,” or “targeting sequence” refers to a sequence within a guide RNA that is complementary to a target sequence and functions to direct a guide RNA to a target sequence for cleavage by a Cas9. For clarity, the terms “spacer sequence”, “spacer,” “protospacer,” “guide sequence,” or “targeting sequence” as used herein, and unless specifically stated otherwise, may refer to an RNA molecule (comprising A, C, G, and U nucleotides) or to a DNA molecule encoding such an RNA molecule (comprising A, C, G, and T nucleotides) or complementary sequences thereof. A guide sequence can be 24, 23, 22, 21, 20 or fewer base pairs in length, e.g., in the case of Staphylococcus lugdunensis (i.e., SluCas9) or Staphylococcus aureus (i.e., SaCas9) and related Cas9 homologs/orthologs. In preferred embodiments, a guide/spacer sequence in the case of SluCas9 or SaCas9 is at least 20 base pairs in length, or more specifically, within 20-25 base pairs in length (see, e.g., Schmidt et al., 2021, Nature Communications, “Improved CRISPR genome editing using small highly active and specific engineered RNA-guided nucleases”). Shorter or longer sequences can also be used as guides, e.g., 15-, 16-, 17-, 18-, 19-, 20-, 21-, 22-, 23-, 24-, or 25-nucleotides in length. For example, in some embodiments, the guide sequence comprises at least 17, 18, 19, 20, 21, 22, 23, 24, or 25 contiguous nucleotides of a sequence selected from SEQ ID NOs: 11-15 or 27-69 (for SaCas9, including SaCas9KKH), and 243-269 (for SluCas9). In preferred embodiments, a guide/spacer sequence in the case of SluCas9 or SaCas9 is at least 20 base pairs in length, or more specifically, within 20-25 base pairs in length (see, e.g., Schmidt et al., 2021, Nature Communications, “Improved CRISPR genome editing using small highly active and specific engineered RNA-guided nucleases”). In some embodiments, the guide sequence comprises a sequence selected from SEQ ID NOs: 11-15, 27-69, or 243-269. In some embodiments, the target sequence is in a gene or on a chromosome, for example, and is complementary to the guide sequence. In some embodiments, the degree of complementarity or identity between a guide sequence and its corresponding target sequence may be about 75%, 80%, 85%, 90%, 95%, 96%, 97%, 98%, 99%, or 100%. For example, in some embodiments, the guide sequence comprises a sequence with about 75%, 80%, 85%, 90%, 95%, 96%, 97%, 98%, 99%, or 100% identity to at least 17, 18, 19, 20, 21, 22, 23, 24, or 25 contiguous nucleotides of a sequence selected from SEQ ID NOs: 11-15, 27-69, or 243-269. In some embodiments, the guide sequence comprises a sequence with about 75%, 80%, 85%, 90%, 95%, 96%, 97%, 98%, 99%, or 100% identity to a sequence selected from SEQ ID NOs: 11-15, 27-69, or 243-269. In some embodiments, the guide sequence and the target region may be 100% complementary or identical. In other embodiments, the guide sequence and the target region may contain at least one mismatch. For example, the guide sequence and the target sequence may contain 1, 2, 3, or 4 mismatches, where the total length of the target sequence is at least 17, 18, 19, 20 or more base pairs. In some embodiments, the guide sequence and the target region may contain 1-4 mismatches where the guide sequence comprises at least 17, 18, 19, 20 or more nucleotides. In some embodiments, the guide sequence and the target region may contain 1, 2, 3, or 4 mismatches where the guide sequence comprises 20 nucleotides. In some embodiments, the guide sequence and the target region do not contain any mismatches.

[0090] In some embodiments, the guide sequence comprises a sequence selected from SEQ ID NOs: 11-15, 27-69, or 243-269, wherein if the 5′ terminal nucleotide is not guanine, one or more guanine (g) is added to the sequence at its 5′ end. In some embodiments, the 5′ g or gg is included in some instances for transcription, for example, for expression by the RNA polymerase III-dependent U6 promoter or the T7 promoter. In some embodiments, a 5′ guanine is added to any one of the guide sequences or pairs of guide sequences disclosed herein.

[0091] Target sequences for Cas9s include both the positive and negative strands of genomic DNA (i.e., the sequence given and the sequence's reverse compliment), as a nucleic acid substrate for a Cas9 is a double stranded nucleic acid. Accordingly, where a guide sequence is said to be “complementary to a target sequence”, it is to be understood that the guide sequence may direct a guide RNA to bind to the reverse complement of a target sequence. Thus, in some embodiments, where the guide sequence binds the reverse complement of a target sequence, the guide sequence is identical to certain nucleotides of the target sequence (e.g., the target sequence not including the PAM) except for the substitution of U for T in the guide sequence.

[0092] As used herein, “ribonucleoprotein” (RNP) or “RNP complex” refers to a guide RNA together with a Cas9. In some embodiments, the guide RNA guides the Cas9, such as a SluCas9 or a SaCas9, to a target sequence, and the guide RNA hybridizes with and the agent binds to the target sequence, which can be followed by cleaving or nicking (in the context of a modified “nickase” Cas9).

[0093] As used herein, a first sequence is considered to “comprise a sequence with at least X % identity to” a second sequence if an alignment of the first sequence to the second sequence shows that X % or more of the positions of the second sequence in its entirety are matched by the first sequence. For example, the sequence AAGA comprises a sequence with 100% identity to the sequence AAG because an alignment would give 100% identity in that there are matches to all three positions of the second sequence. The differences between RNA and DNA (generally the exchange of uridine for thymidine or vice versa) and the presence of nucleoside analogs such as modified uridines do not contribute to differences in identity or complementarity among polynucleotides as long as the relevant nucleotides (such as thymidine, uridine, or modified uridine) have the same complement (e.g., adenosine for all of thymidine, uridine, or modified uridine; another example is cytosine and 5-methylcytosine, both of which have guanosine or modified guanosine as a complement). Thus, for example, the sequence 5′-AXG where X is any modified uridine, such as pseudouridine, N1-methyl pseudouridine, or 5-methoxyuridine, is considered 100% identical to AUG in that both are perfectly complementary to the same sequence (5′-CAU). Exemplary alignment algorithms are the Smith-Waterman and Needleman-Wunsch algorithms, which are well-known in the art. One skilled in the art will understand what choice of algorithm and parameter settings are appropriate for a given pair of sequences to be aligned; for sequences of generally similar length and expected identity >50% for amino acids or >75% for nucleotides, the Needleman-Wunsch algorithm with default settings of the Needleman-Wunsch algorithm interface provided by the EBI at the www.ebi.ac.uk web server is generally appropriate.

[0094] “mRNA” is used herein to refer to a polynucleotide that is not DNA and comprises an open reading frame that can be translated into a polypeptide (i.e., can serve as a substrate for translation by a ribosome and amino-acylated tRNAs). mRNA can comprise a phosphate-sugar backbone including ribose residues or analogs thereof, e.g., 2′-methoxy ribose residues. In some embodiments, the sugars of an mRNA phosphate-sugar backbone consist essentially of ribose residues, 2′-methoxy ribose residues, or a combination thereof.

[0095] Guide sequences useful in the guide RNA compositions and methods described herein are shown, for example, in Tables 1-2, and throughout the specification.

[0096] As used herein, a “target sequence” refers to a sequence of nucleic acid in a target gene that has complementarity to at least a portion of the guide sequence of the guide RNA. The interaction of the target sequence and the guide sequence directs a Cas9 to bind, and potentially nick or cleave (depending on the activity of the agent), within or near the target sequence.

[0097] As used herein, “treatment” refers to any administration or application of a therapeutic for disease or disorder in a subject, and includes inhibiting the disease or development of the disease (which may occur before or after the disease is formally diagnosed, e.g., in cases where a subject has a genotype that has the potential or is likely to result in development of the disease), arresting its development, relieving one or more symptoms of the disease, curing the disease, or preventing reoccurrence of one or more symptoms of the disease. For example, treatment of DMD may comprise alleviating symptoms of DMD.

[0098] As used herein, “ameliorating” refers to any beneficial effect on a phenotype or symptom, such as reducing its severity, slowing or delaying its development, arresting its development, or partially or completely reversing or eliminating it. In the case of quantitative phenotypes such as expression levels, ameliorating encompasses changing the expression level so that it is closer to the expression level seen in healthy or unaffected cells or individuals.

[0099] A “pharmaceutically acceptable excipient” refers to an agent that is included in a pharmaceutical formulation that is not the active ingredient. Pharmaceutically acceptable excipients may e.g., aid in drug delivery or support or enhance stability or bioavailability.

[0100] The term “about” or “approximately” means an acceptable error for a particular value as determined by one of ordinary skill in the art, which depends in part on how the value is measured or determined.

[0101] As used herein, “Staphylococcus aureus Cas9” may also be referred to as SaCas9, and includes wild type SaCas9 (e.g., SEQ ID NO: 711) and variants thereof. A variant of SaCas9 comprises one or more amino acid changes as compared to SEQ ID NO: 711, including insertion, deletion, or substitution of one or more amino acids, or a chemical modification to one or more amino acids. For clarity, SaCas9KKIH is a SaCas9 variant.

[0102] As used herein, “Staphylococcus lugdunensis Cas9” may also be referred to as SluCas9, and includes wild type SluCas9 (e.g., SEQ ID NO: 712) and variants thereof. A variant of SluCas9 comprises one or more amino acid changes as compared to SEQ ID NO: 712, including insertion, deletion, or substitution of one or more amino acids, or a chemical modification to one or more amino acids.

### II. Compositions

[0103] Provided herein are compositions comprising guide RNAs and pairs ofguide RNAs useful for treating Duchenne Muscular Dystrophy (DMD). The provided pairs of guide RNAs, when used with the correct endonuclease, function to precisely delete a small portion (e.g., less than about 250 nucleotides) of exon 51 of the DMD gene. Table 2 provides a listing of guide sequences of guide RNAs, and Tables 1A-11D provide detailed information regarding these sequences.

### Tables 1A-D: Guides and Guide Pairs

TABLE 1A
Exon 51 SaCas9 guides:

| Seq | Guide ID or | |
|---|---|---|
| ID | Guide RNA | |
| No. | Name | Guide Sequence |
| 11 | E51Sa1 | TAGTAACCACAGGTTGTGTCAC |
| 12 | E51Sa2 | GTTGTGTCACCAGAGTAACAGT |
| 13 | E51Sa4 | GAGGGTGATGGTGGGTGACCTT |
| 14 | E51Sa5 | TATAAAATCACAGAGGGTGATG |
| 15 | E51Sa6 | TTGATCAAGTTATAAAATCACA |
| 27 | E51SaCas9KKH1 | TCATTTTTTCTCATACCTTCTG |
| 28 | E51SaCas9KKH2 | TTTTTTCTCATACCTTCTGCTT |
| 29 | E51SaCas9KKH3 | CCTTCTGCTTGATGATCATCTC |
| 30 | E51SaCas9KKH4 | ATGATCATCTCGTTGATATCCT |
| 31 | E51SaCas9KKH5 | AAGGTCACCCACCATCACCCTC |
| 32 | E51SaCas9KKH6 | ATCACCCTCTGTGATTTTATAA |
| 33 | E51SaCas9KKH7 | ATAACTTGATCAAGCAGAGAAA |
| 34 | E51SaCas9KKH8 | CTTGATCAAGCAGAGAAAGCCA |
| 35 | E51SaCas9KKH9 | ATCAAGCAGAGAAAGCCAGTCG |
| 36 | E51SaCas9KKH10 | CAGTCGGTAAGTTCTGTCCAAG |
| 37 | E51SaCas9KKH11 | GTAAGTTCTGTCCAAGCCCGGT |
| 38 | E51SaCas9KKH12 | AGCCCGGTTGAAATCTGCCAGA |
| 39 | E51SaCas9KKH13 | AGCAGGTACCTCCAACATCAAG |
| 40 | E51SaCas9KKH14 | CAACATCAAGGAAGATGGCATT |
| 41 | E51SaCas9KKH15 | AGGAAGATGGCATTTCTAGTTT |
| 42 | E51SaCas9KKH16 | ATGGCATTTCTAGTTTGGAGAT |
| 43 | E51SaCas9KKH17 | CTAGTTTGGAGATGGCAGTTTC |
| 44 | E51SaCas9KKH18 | GATGGCAGTTTCCTTAGTAACC |
| 45 | E51SaCas9KKH19 | TAGTAACCACAGGTTGTGTCAC |
| 46 | E51SaCas9KKH20 | CCACAGGTTGTGTCACCAGAGT |
| 47 | E51SaCas9KKH21 | GTTGTGTCACCAGAGTAACAGT |
| 48 | E51SaCas9KKH22 | GAGTAACAGTCTGAGTAGGAGC |
| 49 | E51SaCas9KKH23 | TCTGAGTAGGAGCTAAAATATT |
| 50 | E51SaCas9KKH24 | AGAAGGTATGAGAAAAAATGAT |
| 51 | E51SaCas9KKH25 | TCAAGCAGAAGGTATGAGAAAA |
| 52 | E51SaCas9KKH26 | TCATCAAGCAGAAGGTATGAGA |
| 53 | E51SaCas9KKH27 | TCAACGAGATGATCATCAAGCA |
| 54 | E51SaCas9KKH28 | GTGACCTTGAGGATATCAACGA |
| 55 | E51SaCas9KKH29 | TGGGTGACCTTGAGGATATCAA |
| 56 | E51SaCas9KKH30 | GAGGGTGATGGTGGGTGACCTT |
| 57 | E51SaCas9KKH31 | TATAAAATCACAGAGGGTGATG |
| 58 | E51SaCas9KKH32 | AAGTTATAAAATCACAGAGGGT |
| 59 | E51SaCas9KKH33 | ATCAAGTTATAAAATCACAGAG |
| 60 | E51SaCas9KKH34 | TTGATCAAGTTATAAAATCACA |
| 61 | E51SaCas9KKH35 | CTTTCTCTGCTTGATCAAGTTA |
| 62 | E51SaCas9KKH36 | CCGACTGGCTTTCTCTGCTTGA |
| 63 | E51SaCas9KKH37 | ACTTACCGACTGGCTTTCTCTG |
| 64 | E51SaCas9KKH38 | GATGTTGGAGGTACCTGCTCTG |
| 65 | E51SaCas9KKH39 | AAATGCCATCTTCCTTGATGTT |
| 66 | E51SaCas9KKH40 | CCAAACTAGAAATGCCATCTTC |
| 67 | E51SaCas9KKH41 | AGGAAACTGCCATCTCCAAACT |
| 68 | E51SaCas9KKH42 | CTGTTACTCTGGTGACACAACC |
| 69 | E51SaCas9KKH43 | TAGCTCCTACTCAGACTGTTAC |

TABLE 1B
Exon 51 SaCas9 pairs:

| Guide 1 | | | Guide 2 | | |
|---|---|---|---|---|---|
| Seq ID | | Guide 1 | Seq ID | | Guide 2 |
| No. | Guide 1 | Sequence | No. | Guide 2 | Sequence |
| 11 | E51Sa1 | TAGTAACCACAGGTTG | 12 | E51Sa2 | GTTGTGTCACCAGAGT |
| | | TGTCAC | | | AACAGT |
| 11 | E51Sa1 | TAGTAACCACAGGTTG | 13 | E51Sa4 | GAGGGTGATGGTGGGT |
| | | TGTCAC | | | GACCTT |
| 11 | E51Sa1 | TAGTAACCACAGGTTG | 14 | E51Sa5 | TATAAAATCACAGAGG |
| | | TGTCAC | | | GTGATG |
| 11 | E51Sa1 | TAGTAACCACAGGTTG | 15 | E51Sa6 | TTGATCAAGTTATAAA |
| | | TGTCAC | | | ATCACA |
| 12 | E51Sa2 | GTTGTGTCACCAGAGT | 13 | E51Sa4 | GAGGGTGATGGTGGGT |
| | | AACAGT | | | GACCTT |
| 12 | E51Sa2 | GTTGTGTCACCAGAGT | 14 | E51Sa5 | TATAAAATCACAGAGG |
| | | AACAGT | | | GTGATG |
| 12 | E51Sa2 | GTTGTGTCACCAGAGT | 15 | E51Sa6 | TTGATCAAGTTATAAA |
| | | AACAGT | | | ATCACA |
| 13 | E51Sa4 | GAGGGTGATGGTGGGT | 14 | E51Sa5 | TATAAAATCACAGAGG |
| | | GACCTT | | | GTGATG |
| 13 | E51Sa4 | GAGGGTGATGGTGGGT | 15 | E51Sa6 | TTGATCAAGTTATAAA |
| | | GACCTT | | | ATCACA |
| 14 | E51Sa5 | TATAAAATCACAGAGG | 15 | E51Sa6 | TTGATCAAGTTATAAA |
| | | GTGATG | | | ATCACA |
| 27 | E51SaCas9K | TCATTTTTTCTCATAC | 28 | E51SaCas9K | TTTTTTCTCATACCTT |
| | KH1 | CTTCTG | | KH2 | CTGCTT |
| 27 | E51SaCas9K | TCATTTTTTCTCATAC | 29 | E51SaCas9K | CCTTCTGCTTGATGAT |
| | KH1 | CTTCTG | | KH3 | CATCTC |
| 27 | E51SaCas9K | TCATTTTTTCTCATAC | 30 | E51SaCas9K | ATGATCATCTCGTTGA |
| | KH1 | CTTCTG | | KH4 | TATCCT |
| 27 | E51SaCas9K | TCATTTTTTCTCATAC | 31 | E51SaCas9K | AAGGTCACCCACCATC |
| | KH1 | CTTCTG | | KH5 | ACCCTC |
| 27 | E51SaCas9K | TCATTTTTTCTCATAC | 32 | E51SaCas9K | ATCACCCTCTGTGATT |
| | KH1 | CTTCTG | | KH6 | TTATAA |
| 27 | E51SaCas9K | TCATTTTTTCTCATAC | 33 | E51SaCas9K | ATAACTTGATCAAGCA |
| | KH1 | CTTCTG | | KH7 | GAGAAA |
| 27 | E51SaCas9K | TCATTTTTTCTCATAC | 34 | E51SaCas9K | CTTGATCAAGCAGAGA |
| | KH1 | CTTCTG | | KH8 | AAGCCA |
| 27 | E51SaCas9K | TCATTTTTTCTCATAC | 35 | E51SaCas9K | ATCAAGCAGAGAAAGC |
| | KH1 | CTTCTG | | KH9 | CAGTCG |
| 27 | E51SaCas9K | TCATTTTTTCTCATAC | 36 | E51SaCas9K | CAGTCGGTAAGTTCTG |
| | KH1 | CTTCTG | | KH10 | TCCAAG |
| 27 | E51SaCas9K | TCATTTTTTCTCATAC | 37 | E51SaCas9K | GTAAGTTCTGTCCAAG |
| | KH1 | CTTCTG | | KH11 | CCCGGT |
| 27 | E51SaCas9K | TCATTTTTTCTCATAC | 38 | E51SaCas9K | AGCCCGGTTGAAATCT |
| | KH1 | CTTCTG | | KH12 | GCCAGA |
| 27 | E51SaCas9K | TCATTTTTTCTCATAC | 39 | E51SaCas9K | AGCAGGTACCTCCAAC |
| | KH1 | CTTCTG | | KH13 | ATCAAG |
| 27 | E51SaCas9K | TCATTTTTTCTCATAC | 40 | E51SaCas9K | CAACATCAAGGAAGAT |
| | KH1 | CTTCTG | | KH14 | GGCATT |
| 27 | E51SaCas9K | TCATTTTTTCTCATAC | 41 | E51SaCas9K | AGGAAGATGGCATTTC |
| | KH1 | CTTCTG | | KH15 | TAGTTT |
| 27 | E51SaCas9K | TCATTTTTTCTCATAC | 42 | E51SaCas9K | ATGGCATTTCTAGTTT |
| | KH1 | CTTCTG | | KH16 | GGAGAT |
| 27 | E51SaCas9K | TCATTTTTTCTCATAC | 43 | E51SaCas9K | CTAGTTTGGAGATGGC |
| | KH1 | CTTCTG | | KH17 | AGTTTC |
| 27 | E51SaCas9K | TCATTTTTTCTCATAC | 44 | E51SaCas9K | GATGGCAGTTTCCTTA |
| | KH1 | CTTCTG | | KH18 | GTAACC |
| 27 | E51SaCas9K | TCATTTTTTCTCATAC | 45 | E51SaCas9K | TAGTAACCACAGGTTG |
| | KH1 | CTTCTG | | KH19 | TGTCAC |
| 27 | E51SaCas9K | TCATTTTTTCTCATAC | 46 | E51SaCas9K | CCACAGGTTGTGTCAC |
| | KH1 | CTTCTG | | KH20 | CAGAGT |
| 27 | E51SaCas9K | TCATTTTTTCTCATAC | 47 | E51SaCas9K | GTTGTGTCACCAGAGT |
| | KH1 | CTTCTG | | KH21 | AACAGT |
| 27 | E51SaCas9K | TCATTTTTTCTCATAC | 48 | E51SaCas9K | GAGTAACAGTCTGAGT |
| | KH1 | CTTCTG | | KH22 | AGGAGC |
| 27 | E51SaCas9K | TCATTTTTTCTCATAC | 53 | E51SaCas9K | TCAACGAGATGATCAT |
| | KH1 | CTTCTG | | KH27 | CAAGCA |
| 27 | E51SaCas9K | TCATTTTTTCTCATAC | 54 | E51SaCas9K | GTGACCTTGAGGATAT |
| | KH1 | CTTCTG | | KH28 | CAACGA |
| 27 | E51SaCas9K | TCATTTTTTCTCATAC | 55 | E51SaCas9K | TGGGTGACCTTGAGGA |
| | KH1 | CTTCTG | | KH29 | TATCAA |
| 27 | E51SaCas9K | TCATTTTTTCTCATAC | 56 | E51SaCas9K | GAGGGTGATGGTGGGT |
| | KH1 | CTTCTG | | KH30 | GACCTT |
| 27 | E51SaCas9K | TCATTTTTTCTCATAC | 57 | E51SaCas9K | TATAAAATCACAGAGG |
| | KH1 | CTTCTG | | KH31 | GTGATG |
| 27 | E51SaCas9K | TCATTTTTTCTCATAC | 58 | E51SaCas9K | AAGTTATAAAATCACA |
| | KH1 | CTTCTG | | KH32 | GAGGGT |
| 27 | E51SaCas9K | TCATTTTTTCTCATAC | 59 | E51SaCas9K | ATCAAGTTATAAAATC |
| | KH1 | CTTCTG | | KH33 | ACAGAG |
| 27 | E51SaCas9K | TCATTTTTTCTCATAC | 60 | E51SaCas9K | TTGATCAAGTTATAAA |
| | KH1 | CTTCTG | | KH34 | ATCACA |
| 27 | E51SaCas9K | TCATTTTTTCTCATAC | 61 | E51SaCas9K | CTTTCTCTGCTTGATC |
| | KH1 | CTTCTG | | KH35 | AAGTTA |
| 27 | E51SaCas9K | TCATTTTTTCTCATAC | 62 | E51SaCas9K | CCGACTGGCTTTCTCT |
| | KH1 | CTTCTG | | KH36 | GCTTGA |
| 27 | E51SaCas9K | TCATTTTTTCTCATAC | 63 | E51SaCas9K | ACTTACCGACTGGCTT |
| | KH1 | CTTCTG | | KH37 | TCTCTG |
| 27 | E51SaCas9K | TCATTTTTTCTCATAC | 64 | E51SaCas9K | GATGTTGGAGGTACCT |
| | KH1 | CTTCTG | | KH38 | GCTCTG |
| 27 | E51SaCas9K | TCATTTTTTCTCATAC | 65 | E51SaCas9K | AAATGCCATCTTCCTT |
| | KH1 | CTTCTG | | KH39 | GATGTT |
| 27 | E51SaCas9K | TCATTTTTTCTCATAC | 66 | E51SaCas9K | CCAAACTAGAAATGCC |
| | KH1 | CTTCTG | | KH40 | ATCTTC |
| 27 | E51SaCas9K | TCATTTTTTCTCATAC | 67 | E51SaCas9K | AGGAAACTGCCATCTC |
| | KH1 | CTTCTG | | KH41 | CAAACT |
| 27 | E51SaCas9K | TCATTTTTTCTCATAC | 68 | E51SaCas9K | CTGTTACTCTGGTGAC |
| | KH1 | CTTCTG | | KH42 | ACAACC |
| 27 | E51SaCas9K | TCATTTTTTCTCATAC | 69 | E51SaCas9K | TAGCTCCTACTCAGAC |
| | KH1 | CTTCTG | | KH43 | TGTTAC |
| 28 | E51SaCas9K | TTTTTTCTCATACCTT | 29 | E51SaCas9K | CCTTCTGCTTGATGAT |
| | KH2 | CTGCTT | | KH3 | CATCTC |
| 28 | E51SaCas9K | TTTTTTCTCATACCTT | 30 | E51SaCas9K | ATGATCATCTCGTTGA |
| | KH2 | CTGCTT | | KH4 | TATCCT |
| 28 | E51SaCas9K | TTTTTTCTCATACCTT | 31 | E51SaCas9K | AAGGTCACCCACCATC |
| | KH2 | CTGCTT | | KH5 | ACCCTC |
| 28 | E51SaCas9K | TTTTTTCTCATACCTT | 32 | E51SaCas9K | ATCACCCTCTGTGATT |
| | KH2 | CTGCTT | | KH6 | TTATAA |
| 28 | E51SaCas9K | TTTTTTCTCATACCTT | 33 | E51SaCas9K | ATAACTTGATCAAGCA |
| | KH2 | CTGCTT | | KH7 | GAGAAA |
| 28 | E51SaCas9K | TTTTTTCTCATACCTT | 34 | E51SaCas9K | CTTGATCAAGCAGAGA |
| | KH2 | CTGCTT | | KH8 | AAGCCA |
| 28 | E51SaCas9K | TTTTTTCTCATACCTT | 35 | E51SaCas9K | ATCAAGCAGAGAAAGC |
| | KH2 | CTGCTT | | KH9 | CAGTCG |
| 28 | E51SaCas9K | TTTTTTCTCATACCTT | 36 | E51SaCas9K | CAGTCGGTAAGTTCTG |
| | KH2 | CTGCTT | | KH10 | TCCAAG |
| 28 | E51SaCas9K | TTTTTTCTCATACCTT | 37 | E51SaCas9K | GTAAGTTCTGTCCAAG |
| | KH2 | CTGCTT | | KH11 | CCCGGT |
| 28 | E51SaCas9K | TTTTTTCTCATACCTT | 38 | E51SaCas9K | AGCCCGGTTGAAATCT |
| | KH2 | CTGCTT | | KH12 | GCCAGA |
| 28 | E51SaCas9K | TTTTTTCTCATACCTT | 39 | E51SaCas9K | AGCAGGTACCTCCAAC |
| | KH2 | CTGCTT | | KH13 | ATCAAG |
| 28 | E51SaCas9K | TTTTTTCTCATACCTT | 40 | E51SaCas9K | CAACATCAAGGAAGAT |
| | KH2 | CTGCTT | | KH14 | GGCATT |
| 28 | E51SaCas9K | TTTTTTCTCATACCTT | 41 | E51SaCas9K | AGGAAGATGGCATTTC |
| | KH2 | CTGCTT | | KH15 | TAGTTT |
| 28 | E51SaCas9K | TTTTTTCTCATACCTT | 42 | E51SaCas9K | ATGGCATTTCTAGTTT |
| | KH2 | CTGCTT | | KH16 | GGAGAT |
| 28 | E51SaCas9K | TTTTTTCTCATACCTT | 43 | E51SaCas9K | CTAGTTTGGAGATGGC |
| | KH2 | CTGCTT | | KH17 | AGTTTC |
| 28 | E51SaCas9K | TTTTTTCTCATACCTT | 44 | E51SaCas9K | GATGGCAGTTTCCTTA |
| | KH2 | CTGCTT | | KH18 | GTAACC |
| 28 | E51SaCas9K | TTTTTTCTCATACCTT | 45 | E51SaCas9K | TAGTAACCACAGGTTG |
| | KH2 | CTGCTT | | KH19 | TGTCAC |
| 28 | E51SaCas9K | TTTTTTCTCATACCTT | 46 | E51SaCas9K | CCACAGGTTGTGTCAC |
| | KH2 | CTGCTT | | KH20 | CAGAGT |
| 28 | E51SaCas9K | TTTTTTCTCATACCTT | 47 | E51SaCas9K | GTTGTGTCACCAGAGT |
| | KH2 | CTGCTT | | KH21 | AACAGT |
| 28 | E51SaCas9K | TTTTTTCTCATACCTT | 48 | E51SaCas9K | GAGTAACAGTCTGAGT |
| | KH2 | CTGCTT | | KH22 | AGGAGC |
| 28 | E51SaCas9K | TTTTTTCTCATACCTT | 53 | E51SaCas9K | TCAACGAGATGATCAT |
| | KH2 | CTGCTT | | KH27 | CAAGCA |
| 28 | E51SaCas9K | TTTTTTCTCATACCTT | 54 | E51SaCas9K | GTGACCTTGAGGATAT |
| | KH2 | CTGCTT | | KH28 | CAACGA |
| 28 | E51SaCas9K | TTTTTTCTCATACCTT | 55 | E51SaCas9K | TGGGTGACCTTGAGGA |
| | KH2 | CTGCTT | | KH29 | TATCAA |
| 28 | E51SaCas9K | TTTTTTCTCATACCTT | 56 | E51SaCas9K | GAGGGTGATGGTGGGT |
| | KH2 | CTGCTT | | KH30 | GACCTT |
| 28 | E51SaCas9K | TTTTTTCTCATACCTT | 57 | E51SaCas9K | TATAAAATCACAGAGG |
| | KH2 | CTGCTT | | KH31 | GTGATG |
| 28 | E51SaCas9K | TTTTTTCTCATACCTT | 58 | E51SaCas9K | AAGTTATAAAATCACA |
| | KH2 | CTGCTT | | KH32 | GAGGGT |
| 28 | E51SaCas9K | TTTTTTCTCATACCTT | 59 | E51SaCas9K | ATCAAGTTATAAAATC |
| | KH2 | CTGCTT | | KH33 | ACAGAG |
| 28 | E51SaCas9K | TTTTTTCTCATACCTT | 60 | E51SaCas9K | TTGATCAAGTTATAAA |
| | KH2 | CTGCTT | | KH34 | ATCACA |
| 28 | E51SaCas9K | TTTTTTCTCATACCTT | 61 | E51SaCas9K | CTTTCTCTGCTTGATC |
| | KH2 | CTGCTT | | KH35 | AAGTTA |
| 28 | E51SaCas9K | TTTTTTCTCATACCTT | 62 | E51SaCas9K | CCGACTGGCTTTCTCT |
| | KH2 | CTGCTT | | KH36 | GCTTGA |
| 28 | E51SaCas9K | TTTTTTCTCATACCTT | 63 | E51SaCas9K | ACTTACCGACTGGCTT |
| | KH2 | CTGCTT | | KH37 | TCTCTG |
| 28 | E51SaCas9K | TTTTTTCTCATACCTT | 64 | E51SaCas9K | GATGTTGGAGGTACCT |
| | KH2 | CTGCTT | | KH38 | GCTCTG |
| 28 | E51SaCas9K | TTTTTTCTCATACCTT | 65 | E51SaCas9K | AAATGCCATCTTCCTT |
| | KH2 | CTGCTT | | KH39 | GATGTT |
| 28 | E51SaCas9K | TTTTTTCTCATACCTT | 66 | E51SaCas9K | CCAAACTAGAAATGCC |
| | KH2 | CTGCTT | | KH40 | ATCTTC |
| 28 | E51SaCas9K | TTTTTTCTCATACCTT | 67 | E51SaCas9K | AGGAAACTGCCATCTC |
| | KH2 | CTGCTT | | KH41 | CAAACT |
| 28 | E51SaCas9K | TTTTTTCTCATACCTT | 68 | E51SaCas9K | CTGTTACTCTGGTGAC |
| | KH2 | CTGCTT | | KH42 | ACAACC |
| 28 | E51SaCas9K | TTTTTTCTCATACCTT | 69 | E51SaCas9K | TAGCTCCTACTCAGAC |
| | KH2 | CTGCTT | | KH43 | TGTTAC |
| 29 | E51SaCas9K | CCTTCTGCTTGATGAT | 30 | E51SaCas9K | ATGATCATCTCGTTGA |
| | KH3 | CATCTC | | KH4 | TATCCT |
| 29 | E51SaCas9K | CCTTCTGCTTGATGAT | 31 | E51SaCas9K | AAGGTCACCCACCATC |
| | KH3 | CATCTC | | KH5 | ACCCTC |
| 29 | E51SaCas9K | CCTTCTGCTTGATGAT | 32 | E51SaCas9K | ATCACCCTCTGTGATT |
| | KH3 | CATCTC | | KH6 | TTATAA |
| 29 | E51SaCas9K | CCTTCTGCTTGATGAT | 33 | E51SaCas9K | ATAACTTGATCAAGCA |
| | KH3 | CATCTC | | KH7 | GAGAAA |
| 29 | E51SaCas9K | CCTTCTGCTTGATGAT | 34 | E51SaCas9K | CTTGATCAAGCAGAGA |
| | KH3 | CATCTC | | KH8 | AAGCCA |
| 29 | E51SaCas9K | CCTTCTGCTTGATGAT | 35 | E51SaCas9K | ATCAAGCAGAGAAAGC |
| | KH3 | CATCTC | | KH9 | CAGTCG |
| 29 | E51SaCas9K | CCTTCTGCTTGATGAT | 36 | E51SaCas9K | CAGTCGGTAAGTTCTG |
| | KH3 | CATCTC | | KH10 | TCCAAG |
| 29 | E51SaCas9K | CCTTCTGCTTGATGAT | 37 | E51SaCas9K | GTAAGTTCTGTCCAAG |
| | KH3 | CATCTC | | KH11 | CCCGGT |
| 29 | E51SaCas9K | CCTTCTGCTTGATGAT | 38 | E51SaCas9K | AGCCCGGTTGAAATCT |
| | KH3 | CATCTC | | KH12 | GCCAGA |
| 29 | E51SaCas9K | CCTTCTGCTTGATGAT | 39 | E51SaCas9K | AGCAGGTACCTCCAAC |
| | KH3 | CATCTC | | KH13 | ATCAAG |
| 29 | E51SaCas9K | CCTTCTGCTTGATGAT | 40 | E51SaCas9K | CAACATCAAGGAAGAT |
| | KH3 | CATCTC | | KH14 | GGCATT |
| 29 | E51SaCas9K | CCTTCTGCTTGATGAT | 41 | E51SaCas9K | AGGAAGATGGCATTTC |
| | KH3 | CATCTC | | KH15 | TAGTTT |
| 29 | E51SaCas9K | CCTTCTGCTTGATGAT | 42 | E51SaCas9K | ATGGCATTTCTAGTTT |
| | KH3 | CATCTC | | KH16 | GGAGAT |
| 29 | E51SaCas9K | CCTTCTGCTTGATGAT | 43 | E51SaCas9K | CTAGTTTGGAGATGGC |
| | KH3 | CATCTC | | KH17 | AGTTTC |
| 29 | E51SaCas9K | CCTTCTGCTTGATGAT | 44 | E51SaCas9K | GATGGCAGTTTCCTTA |
| | KH3 | CATCTC | | KH18 | GTAACC |
| 29 | E51SaCas9K | CCTTCTGCTTGATGAT | 45 | E51SaCas9K | TAGTAACCACAGGTTG |
| | KH3 | CATCTC | | KH19 | TGTCAC |
| 29 | E51SaCas9K | CCTTCTGCTTGATGAT | 46 | E51SaCas9K | CCACAGGTTGTGTCAC |
| | KH3 | CATCTC | | KH20 | CAGAGT |
| 29 | E51SaCas9K | CCTTCTGCTTGATGAT | 47 | E51SaCas9K | GTTGTGTCACCAGAGT |
| | KH3 | CATCTC | | KH21 | AACAGT |
| 29 | E51SaCas9K | CCTTCTGCTTGATGAT | 48 | E51SaCas9K | GAGTAACAGTCTGAGT |
| | KH3 | CATCTC | | KH22 | AGGAGC |
| 29 | E51SaCas9K | CCTTCTGCTTGATGAT | 53 | E51SaCas9K | TCAACGAGATGATCAT |
| | KH3 | CATCTC | | KH27 | CAAGCA |
| 29 | E51SaCas9K | CCTTCTGCTTGATGAT | 54 | E51SaCas9K | GTGACCTTGAGGATAT |
| | KH3 | CATCTC | | KH28 | CAACGA |
| 29 | E51SaCas9K | CCTTCTGCTTGATGAT | 55 | E51SaCas9K | TGGGTGACCTTGAGGA |
| | KH3 | CATCTC | | KH29 | TATCAA |
| 29 | E51SaCas9K | CCTTCTGCTTGATGAT | 56 | E51SaCas9K | GAGGGTGATGGTGGGT |
| | KH3 | CATCTC | | KH30 | GACCTT |
| 29 | E51SaCas9K | CCTTCTGCTTGATGAT | 57 | E51SaCas9K | TATAAAATCACAGAGG |
| | KH3 | CATCTC | | KH31 | GTGATG |
| 29 | E51SaCas9K | CCTTCTGCTTGATGAT | 58 | E51SaCas9K | AAGTTATAAAATCACA |
| | KH3 | CATCTC | | KH32 | GAGGGT |
| 29 | E51SaCas9K | CCTTCTGCTTGATGAT | 59 | E51SaCas9K | ATCAAGTTATAAAATC |
| | KH3 | CATCTC | | KH33 | ACAGAG |
| 29 | E51SaCas9K | CCTTCTGCTTGATGAT | 60 | E51SaCas9K | TTGATCAAGTTATAAA |
| | KH3 | CATCTC | | KH34 | ATCACA |
| 29 | E51SaCas9K | CCTTCTGCTTGATGAT | 61 | E51SaCas9K | CTTTCTCTGCTTGATC |
| | KH3 | CATCTC | | KH35 | AAGTTA |
| 29 | E51SaCas9K | CCTTCTGCTTGATGAT | 62 | E51SaCas9K | CCGACTGGCTTTCTCT |
| | KH3 | CATCTC | | KH36 | GCTTGA |
| 29 | E51SaCas9K | CCTTCTGCTTGATGAT | 63 | E51SaCas9K | ACTTACCGACTGGCTT |
| | KH3 | CATCTC | | KH37 | TCTCTG |
| 29 | E51SaCas9K | CCTTCTGCTTGATGAT | 64 | E51SaCas9K | GATGTTGGAGGTACCT |
| | KH3 | CATCTC | | KH38 | GCTCTG |
| 29 | E51SaCas9K | CCTTCTGCTTGATGAT | 65 | E51SaCas9K | AAATGCCATCTTCCTT |
| | KH3 | CATCTC | | KH39 | GATGTT |
| 29 | E51SaCas9K | CCTTCTGCTTGATGAT | 66 | E51SaCas9K | CCAAACTAGAAATGCC |
| | KH3 | CATCTC | | KH40 | ATCTTC |
| 29 | E51SaCas9K | CCTTCTGCTTGATGAT | 67 | E51SaCas9K | AGGAAACTGCCATCTC |
| | KH3 | CATCTC | | KH41 | CAAACT |
| 29 | E51SaCas9K | CCTTCTGCTTGATGAT | 68 | E51SaCas9K | CTGTTACTCTGGTGAC |
| | KH3 | CATCTC | | KH42 | ACAACC |
| 29 | E51SaCas9K | CCTTCTGCTTGATGAT | 69 | E51SaCas9K | TAGCTCCTACTCAGAC |
| | KH3 | CATCTC | | KH43 | TGTTAC |
| 30 | E51SaCas9K | ATGATCATCTCGTTGA | 31 | E51SaCas9K | AAGGTCACCCACCATC |
| | KH4 | TATCCT | | KH5 | ACCCTC |
| 30 | E51SaCas9K | ATGATCATCTCGTTGA | 32 | E51SaCas9K | ATCACCCTCTGTGATT |
| | KH4 | TATCCT | | KH6 | TTATAA |
| 30 | E51SaCas9K | ATGATCATCTCGTTGA | 33 | E51SaCas9K | ATAACTTGATCAAGCA |
| | KH4 | TATCCT | | KH7 | GAGAAA |
| 30 | E51SaCas9K | ATGATCATCTCGTTGA | 34 | E51SaCas9K | CTTGATCAAGCAGAGA |
| | KH4 | TATCCT | | KH8 | AAGCCA |
| 30 | E51SaCas9K | ATGATCATCTCGTTGA | 35 | E51SaCas9K | ATCAAGCAGAGAAAGC |
| | KH4 | TATCCT | | KH9 | CAGTCG |
| 30 | E51SaCas9K | ATGATCATCTCGTTGA | 36 | E51SaCas9K | CAGTCGGTAAGTTCTG |
| | KH4 | TATCCT | | KH10 | TCCAAG |
| 30 | E51SaCas9K | ATGATCATCTCGTTGA | 37 | E51SaCas9K | GTAAGTTCTGTCCAAG |
| | KH4 | TATCCT | | KH11 | CCCGGT |
| 30 | E51SaCas9K | ATGATCATCTCGTTGA | 38 | E51SaCas9K | AGCCCGGTTGAAATCT |
| | KH4 | TATCCT | | KH12 | GCCAGA |
| 30 | E51SaCas9K | ATGATCATCTCGTTGA | 39 | E51SaCas9K | AGCAGGTACCTCCAAC |
| | KH4 | TATCCT | | KH13 | ATCAAG |
| 30 | E51SaCas9K | ATGATCATCTCGTTGA | 40 | E51SaCas9K | CAACATCAAGGAAGAT |
| | KH4 | TATCCT | | KH14 | GGCATT |
| 30 | E51SaCas9K | ATGATCATCTCGTTGA | 41 | E51SaCas9K | AGGAAGATGGCATTTC |
| | KH4 | TATCCT | | KH15 | TAGTTT |
| 30 | E51SaCas9K | ATGATCATCTCGTTGA | 42 | E51SaCas9K | ATGGCATTTCTAGTTT |
| | KH4 | TATCCT | | KH16 | GGAGAT |
| 30 | E51SaCas9K | ATGATCATCTCGTTGA | 43 | E51SaCas9K | CTAGTTTGGAGATGGC |
| | KH4 | TATCCT | | KH17 | AGTTTC |
| 30 | E51SaCas9K | ATGATCATCTCGTTGA | 44 | E51SaCas9K | GATGGCAGTTTCCTTA |
| | KH4 | TATCCT | | KH18 | GTAACC |
| 30 | E51SaCas9K | ATGATCATCTCGTTGA | 45 | E51SaCas9K | TAGTAACCACAGGTTG |
| | KH4 | TATCCT | | KH19 | TGTCAC |
| 30 | E51SaCas9K | ATGATCATCTCGTTGA | 46 | E51SaCas9K | CCACAGGTTGTGTCAC |
| | KH4 | TATCCT | | KH20 | CAGAGT |
| 30 | E51SaCas9K | ATGATCATCTCGTTGA | 47 | E51SaCas9K | GTTGTGTCACCAGAGT |
| | KH4 | TATCCT | | KH21 | AACAGT |
| 30 | E51SaCas9K | ATGATCATCTCGTTGA | 48 | E51SaCas9K | GAGTAACAGTCTGAGT |
| | KH4 | TATCCT | | KH22 | AGGAGC |
| 30 | E51SaCas9K | ATGATCATCTCGTTGA | 53 | E51SaCas9K | TCAACGAGATGATCAT |
| | KH4 | TATCCT | | KH27 | CAAGCA |
| 30 | E51SaCas9K | ATGATCATCTCGTTGA | 54 | E51SaCas9K | GTGACCTTGAGGATAT |
| | KH4 | TATCCT | | KH28 | CAACGA |
| 30 | E51SaCas9K | ATGATCATCTCGTTGA | 55 | E51SaCas9K | TGGGTGACCTTGAGGA |
| | KH4 | TATCCT | | KH29 | TATCAA |
| 30 | E51SaCas9K | ATGATCATCTCGTTGA | 56 | E51SaCas9K | GAGGGTGATGGTGGGT |
| | KH4 | TATCCT | | KH30 | GACCTT |
| 30 | E51SaCas9K | ATGATCATCTCGTTGA | 57 | E51SaCas9K | TATAAAATCACAGAGG |
| | KH4 | TATCCT | | KH31 | GTGATG |
| 30 | E51SaCas9K | ATGATCATCTCGTTGA | 58 | E51SaCas9K | AAGTTATAAAATCACA |
| | KH4 | TATCCT | | KH32 | GAGGGT |
| 30 | E51SaCas9K | ATGATCATCTCGTTGA | 59 | E51SaCas9K | ATCAAGTTATAAAATC |
| | KH4 | TATCCT | | KH33 | ACAGAG |
| 30 | E51SaCas9K | ATGATCATCTCGTTGA | 60 | E51SaCas9K | TTGATCAAGTTATAAA |
| | KH4 | TATCCT | | KH34 | ATCACA |
| 30 | E51SaCas9K | ATGATCATCTCGTTGA | 61 | E51SaCas9K | CTTTCTCTGCTTGATC |
| | KH4 | TATCCT | | KH35 | AAGTTA |
| 30 | E51SaCas9K | ATGATCATCTCGTTGA | 62 | E51SaCas9K | CCGACTGGCTTTCTCT |
| | KH4 | TATCCT | | KH36 | GCTTGA |
| 30 | E51SaCas9K | ATGATCATCTCGTTGA | 63 | E51SaCas9K | ACTTACCGACTGGCTT |
| | KH4 | TATCCT | | KH37 | TCTCTG |
| 30 | E51SaCas9K | ATGATCATCTCGTTGA | 64 | E51SaCas9K | GATGTTGGAGGTACCT |
| | KH4 | TATCCT | | KH38 | GCTCTG |
| 30 | E51SaCas9K | ATGATCATCTCGTTGA | 65 | E51SaCas9K | AAATGCCATCTTCCTT |
| | KH4 | TATCCT | | KH39 | GATGTT |
| 30 | E51SaCas9K | ATGATCATCTCGTTGA | 66 | E51SaCas9K | CCAAACTAGAAATGCC |
| | KH4 | TATCCT | | KH40 | ATCTTC |
| 30 | E51SaCas9K | ATGATCATCTCGTTGA | 67 | E51SaCas9K | AGGAAACTGCCATCTC |
| | KH4 | TATCCT | | KH41 | CAAACT |
| 30 | E51SaCas9K | ATGATCATCTCGTTGA | 68 | E51SaCas9K | CTGTTACTCTGGTGAC |
| | KH4 | TATCCT | | KH42 | ACAACC |
| 30 | E51SaCas9K | ATGATCATCTCGTTGA | 69 | E51SaCas9K | TAGCTCCTACTCAGAC |
| | KH4 | TATCCT | | KH43 | TGTTAC |
| 31 | E51SaCas9K | AAGGTCACCCACCATC | 32 | E51SaCas9K | ATCACCCTCTGTGATT |
| | KH5 | ACCCTC | | KH6 | TTATAA |
| 31 | E51SaCas9K | AAGGTCACCCACCATC | 33 | E51SaCas9K | ATAACTTGATCAAGCA |
| | KH5 | ACCCTC | | KH7 | GAGAAA |
| 31 | E51SaCas9K | AAGGTCACCCACCATC | 34 | E51SaCas9K | CTTGATCAAGCAGAGA |
| | KH5 | ACCCTC | | KH8 | AAGCCA |
| 31 | E51SaCas9K | AAGGTCACCCACCATC | 35 | E51SaCas9K | ATCAAGCAGAGAAAGC |
| | KH5 | ACCCTC | | KH9 | CAGTCG |
| 31 | E51SaCas9K | AAGGTCACCCACCATC | 36 | E51SaCas9K | CAGTCGGTAAGTTCTG |
| | KH5 | ACCCTC | | KH10 | TCCAAG |
| 31 | E51SaCas9K | AAGGTCACCCACCATC | 37 | E51SaCas9K | GTAAGTTCTGTCCAAG |
| | KH5 | ACCCTC | | KH11 | CCCGGT |
| 31 | E51SaCas9K | AAGGTCACCCACCATC | 38 | E51SaCas9K | AGCCCGGTTGAAATCT |
| | KH5 | ACCCTC | | KH12 | GCCAGA |
| 31 | E51SaCas9K | AAGGTCACCCACCATC | 39 | E51SaCas9K | AGCAGGTACCTCCAAC |
| | KH5 | ACCCTC | | KH13 | ATCAAG |
| 31 | E51SaCas9K | AAGGTCACCCACCATC | 40 | E51SaCas9K | CAACATCAAGGAAGAT |
| | KH5 | ACCCTC | | KH14 | GGCATT |
| 31 | E51SaCas9K | AAGGTCACCCACCATC | 41 | E51SaCas9K | AGGAAGATGGCATTTC |
| | KH5 | ACCCTC | | KH15 | TAGTTT |
| 31 | E51SaCas9K | AAGGTCACCCACCATC | 42 | E51SaCas9K | ATGGCATTTCTAGTTT |
| | KH5 | ACCCTC | | KH16 | GGAGAT |
| 31 | E51SaCas9K | AAGGTCACCCACCATC | 43 | E51SaCas9K | CTAGTTTGGAGATGGC |
| | KH5 | ACCCTC | | KH17 | AGTTTC |
| 31 | E51SaCas9K | AAGGTCACCCACCATC | 44 | E51SaCas9K | GATGGCAGTTTCCTTA |
| | KH5 | ACCCTC | | KH18 | GTAACC |
| 31 | E51SaCas9K | AAGGTCACCCACCATC | 45 | E51SaCas9K | TAGTAACCACAGGTTG |
| | KH5 | ACCCTC | | KH19 | TGTCAC |
| 31 | E51SaCas9K | AAGGTCACCCACCATC | 46 | E51SaCas9K | CCACAGGTTGTGTCAC |
| | KH5 | ACCCTC | | KH20 | CAGAGT |
| 31 | E51SaCas9K | AAGGTCACCCACCATC | 47 | E51SaCas9K | GTTGTGTCACCAGAGT |
| | KH5 | ACCCTC | | KH21 | AACAGT |
| 31 | E51SaCas9K | AAGGTCACCCACCATC | 48 | E51SaCas9K | GAGTAACAGTCTGAGT |
| | KH5 | ACCCTC | | KH22 | AGGAGC |
| 31 | E51SaCas9K | AAGGTCACCCACCATC | 53 | E51SaCas9K | TCAACGAGATGATCAT |
| | KH5 | ACCCTC | | KH27 | CAAGCA |
| 31 | E51SaCas9K | AAGGTCACCCACCATC | 54 | E51SaCas9K | GTGACCTTGAGGATAT |
| | KH5 | ACCCTC | | KH28 | CAACGA |
| 31 | E51SaCas9K | AAGGTCACCCACCATC | 55 | E51SaCas9K | TGGGTGACCTTGAGGA |
| | KH5 | ACCCTC | | KH29 | TATCAA |
| 31 | E51SaCas9K | AAGGTCACCCACCATC | 56 | E51SaCas9K | GAGGGTGATGGTGGGT |
| | KH5 | ACCCTC | | KH30 | GACCTT |
| 31 | E51SaCas9K | AAGGTCACCCACCATC | 57 | E51SaCas9K | TATAAAATCACAGAGG |
| | KH5 | ACCCTC | | KH31 | GTGATG |
| 31 | E51SaCas9K | AAGGTCACCCACCATC | 58 | E51SaCas9K | AAGTTATAAAATCACA |
| | KH5 | ACCCTC | | KH32 | GAGGGT |
| 31 | E51SaCas9K | AAGGTCACCCACCATC | 59 | E51SaCas9K | ATCAAGTTATAAAATC |
| | KH5 | ACCCTC | | KH33 | ACAGAG |
| 31 | E51SaCas9K | AAGGTCACCCACCATC | 60 | E51SaCas9K | TTGATCAAGTTATAAA |
| | KH5 | ACCCTC | | KH34 | ATCACA |
| 31 | E51SaCas9K | AAGGTCACCCACCATC | 61 | E51SaCas9K | CTTTCTCTGCTTGATC |
| | KH5 | ACCCTC | | KH35 | AAGTTA |
| 31 | E51SaCas9K | AAGGTCACCCACCATC | 62 | E51SaCas9K | CCGACTGGCTTTCTCT |
| | KH5 | ACCCTC | | KH36 | GCTTGA |
| 31 | E51SaCas9K | AAGGTCACCCACCATC | 63 | E51SaCas9K | ACTTACCGACTGGCTT |
| | KH5 | ACCCTC | | KH37 | TCTCTG |
| 31 | E51SaCas9K | AAGGTCACCCACCATC | 64 | E51SaCas9K | GATGTTGGAGGTACCT |
| | KH5 | ACCCTC | | KH38 | GCTCTG |
| 31 | E51SaCas9K | AAGGTCACCCACCATC | 65 | E51SaCas9K | AAATGCCATCTTCCTT |
| | KH5 | ACCCTC | | KH39 | GATGTT |
| 31 | E51SaCas9K | AAGGTCACCCACCATC | 66 | E51SaCas9K | CCAAACTAGAAATGCC |
| | KH5 | ACCCTC | | KH40 | ATCTTC |
| 31 | E51SaCas9K | AAGGTCACCCACCATC | 67 | E51SaCas9K | AGGAAACTGCCATCTC |
| | KH5 | ACCCTC | | KH41 | CAAACT |
| 31 | E51SaCas9K | AAGGTCACCCACCATC | 68 | E51SaCas9K | CTGTTACTCTGGTGAC |
| | KH5 | ACCCTC | | KH42 | ACAACC |
| 31 | E51SaCas9K | AAGGTCACCCACCATC | 69 | E51SaCas9K | TAGCTCCTACTCAGAC |
| | KH5 | ACCCTC | | KH43 | TGTTAC |
| 32 | E51SaCas9K | ATCACCCTCTGTGATT | 33 | E51SaCas9K | ATAACTTGATCAAGCA |
| | KH6 | TTATAA | | KH7 | GAGAAA |
| 32 | E51SaCas9K | ATCACCCTCTGTGATT | 34 | E51SaCas9K | CTTGATCAAGCAGAGA |
| | KH6 | TTATAA | | KH8 | AAGCCA |
| 32 | E51SaCas9K | ATCACCCTCTGTGATT | 35 | E51SaCas9K | ATCAAGCAGAGAAAGC |
| | KH6 | TTATAA | | KH9 | CAGTCG |
| 32 | E51SaCas9K | ATCACCCTCTGTGATT | 36 | E51SaCas9K | CAGTCGGTAAGTTCTG |
| | KH6 | TTATAA | | KH10 | TCCAAG |
| 32 | E51SaCas9K | ATCACCCTCTGTGATT | 37 | E51SaCas9K | GTAAGTTCTGTCCAAG |
| | KH6 | TTATAA | | KH11 | CCCGGT |
| 32 | E51SaCas9K | ATCACCCTCTGTGATT | 38 | E51SaCas9K | AGCCCGGTTGAAATCT |
| | KH6 | TTATAA | | KH12 | GCCAGA |
| 32 | E51SaCas9K | ATCACCCTCTGTGATT | 39 | E51SaCas9K | AGCAGGTACCTCCAAC |
| | KH6 | TTATAA | | KH13 | ATCAAG |
| 32 | E51SaCas9K | ATCACCCTCTGTGATT | 4C | E51SaCas9K | CAACATCAAGGAAGAT |
| | KH6 | TTATAA | | KH14 | GGCATT |
| 32 | E51SaCas9K | ATCACCCTCTGTGATT | 41 | E51SaCas9K | AGGAAGATGGCATTTC |
| | KH6 | TTATAA | | KH15 | TAGTTT |
| 32 | E51SaCas9K | ATCACCCTCTGTGATT | 42 | E51SaCas9K | ATGGCATTTCTAGTTT |
| | KH6 | TTATAA | | KH16 | GGAGAT |
| 32 | E51SaCas9K | ATCACCCTCTGTGATT | 43 | E51SaCas9K | CTAGTTTGGAGATGGC |
| | KH6 | TTATAA | | KH17 | AGTTTC |
| 32 | E51SaCas9K | ATCACCCTCTGTGATT | 44 | E51SaCas9K | GATGGCAGTTTCCTTA |
| | KH6 | TTATAA | | KH18 | GTAACC |
| 32 | E51SaCas9K | ATCACCCTCTGTGATT | 45 | E51SaCas9K | TAGTAACCACAGGTTG |
| | KH6 | TTATAA | | KH19 | TGTCAC |
| 32 | E51SaCas9K | ATCACCCTCTGTGATT | 46 | E51SaCas9K | CCACAGGTTGTGTCAC |
| | KH6 | TTATAA | | KH20 | CAGAGT |
| 32 | E51SaCas9K | ATCACCCTCTGTGATT | 47 | E51SaCas9K | GTTGTGTCACCAGAGT |
| | KH6 | TTATAA | | KH21 | AACAGT |
| 32 | E51SaCas9K | ATCACCCTCTGTGATT | 48 | E51SaCas9K | GAGTAACAGTCTGAGT |
| | KH6 | TTATAA | | KH22 | AGGAGC |
| 32 | E51SaCas9K | ATCACCCTCTGTGATT | 53 | E51SaCas9K | TCAACGAGATGATCAT |
| | KH6 | TTATAA | | KH27 | CAAGCA |
| 32 | E51SaCas9K | ATCACCCTCTGTGATT | 54 | E51SaCas9K | GTGACCTTGAGGATAT |
| | KH6 | TTATAA | | KH28 | CAACGA |
| 32 | E51SaCas9K | ATCACCCTCTGTGATT | 55 | E51SaCas9K | TGGGTGACCTTGAGGA |
| | KH6 | TTATAA | | KH29 | TATCAA |
| 32 | E51SaCas9K | ATCACCCTCTGTGATT | 56 | E51SaCas9K | GAGGGTGATGGTGGGT |
| | KH6 | TTATAA | | KH30 | GACCTT |
| 32 | E51SaCas9K | ATCACCCTCTGTGATT | 57 | E51SaCas9K | TATAAAATCACAGAGG |
| | KH6 | TTATAA | | KH31 | GTGATG |
| 32 | E51SaCas9K | ATCACCCTCTGTGATT | 58 | E51SaCas9K | AAGTTATAAAATCACA |
| | KH6 | TTATAA | | KH32 | GAGGGT |
| 32 | E51SaCas9K | ATCACCCTCTGTGATT | 59 | E51SaCas9K | ATCAAGTTATAAAATC |
| | KH6 | TTATAA | | KH33 | ACAGAG |
| 32 | E51SaCas9K | ATCACCCTCTGTGATT | 60 | E51SaCas9K | TTGATCAAGTTATAAA |
| | KH6 | TTATAA | | KH34 | ATCACA |
| 32 | E51SaCas9K | ATCACCCTCTGTGATT | 61 | E51SaCas9K | CTTTCTCTGCTTGATC |
| | KH6 | TTATAA | | KH35 | AAGTTA |
| 32 | E51SaCas9K | ATCACCCTCTGTGATT | 62 | E51SaCas9K | CCGACTGGCTTTCTCT |
| | KH6 | TTATAA | | KH36 | GCTTGA |
| 32 | E51SaCas9K | ATCACCCTCTGTGATT | 63 | E51SaCas9K | ACTTACCGACTGGCTT |
| | KH6 | TTATAA | | KH37 | TCTCTG |
| 32 | E51SaCas9K | ATCACCCTCTGTGATT | 64 | E51SaCas9K | GATGTTGGAGGTACCT |
| | KH6 | TTATAA | | KH38 | GCTCTG |
| 32 | E51SaCas9K | ATCACCCTCTGTGATT | 65 | E51SaCas9K | AAATGCCATCTTCCTT |
| | KH6 | TTATAA | | KH39 | GATGTT |
| 32 | E51SaCas9K | ATCACCCTCTGTGATT | 66 | E51SaCas9K | CCAAACTAGAAATGCC |
| | KH6 | TTATAA | | KH40 | ATCTTC |
| 32 | E51SaCas9K | ATCACCCTCTGTGATT | 67 | E51SaCas9K | AGGAAACTGCCATCTC |
| | KH6 | TTATAA | | KH41 | CAAACT |
| 32 | E51SaCas9K | ATCACCCTCTGTGATT | 68 | E51SaCas9K | CTGTTACTCTGGTGAC |
| | KH6 | TTATAA | | KH42 | ACAACC |
| 32 | E51SaCas9K | ATCACCCTCTGTGATT | 69 | E51SaCas9K | TAGCTCCTACTCAGAC |
| | KH6 | TTATAA | | KH43 | TGTTAC |
| 33 | E51SaCas9K | ATAACTTGATCAAGCA | 34 | E51SaCas9K | CTTGATCAAGCAGAGA |
| | KH7 | GAGAAA | | KH8 | AAGCCA |
| 33 | E51SaCas9K | ATAACTTGATCAAGCA | 35 | E51SaCas9K | ATCAAGCAGAGAAAGC |
| | KH7 | GAGAAA | | KH9 | CAGTCG |
| 33 | E51SaCas9K | ATAACTTGATCAAGCA | 36 | E51SaCas9K | CAGTCGGTAAGTTCTG |
| | KH7 | GAGAAA | | KH10 | TCCAAG |
| 33 | E51SaCas9K | ATAACTTGATCAAGCA | 37 | E51SaCas9K | GTAAGTTCTGTCCAAG |
| | KH7 | GAGAAA | | KH11 | CCCGGT |
| 33 | E51SaCas9K | ATAACTTGATCAAGCA | 38 | E51SaCas9K | AGCCCGGTTGAAATCT |
| | KH7 | GAGAAA | | KH12 | GCCAGA |
| 33 | E51SaCas9K | ATAACTTGATCAAGCA | 39 | E51SaCas9K | AGCAGGTACCTCCAAC |
| | KH7 | GAGAAA | | KH13 | ATCAAG |
| 33 | E51SaCas9K | ATAACTTGATCAAGCA | 40 | E51SaCas9K | CAACATCAAGGAAGAT |
| | KH7 | GAGAAA | | KH14 | GGCATT |
| 33 | E51SaCas9K | ATAACTTGATCAAGCA | 41 | E51SaCas9K | AGGAAGATGGCATTTC |
| | KH7 | GAGAAA | | KH15 | TAGTTT |
| 33 | E51SaCas9K | ATAACTTGATCAAGCA | 42 | E51SaCas9K | ATGGCATTTCTAGTTT |
| | KH7 | GAGAAA | | KH16 | GGAGAT |
| 33 | E51SaCas9K | ATAACTTGATCAAGCA | 43 | E51SaCas9K | CTAGTTTGGAGATGGC |
| | KH7 | GAGAAA | | KH17 | AGTTTC |
| 33 | E51SaCas9K | ATAACTTGATCAAGCA | 44 | E51SaCas9K | GATGGCAGTTTCCTTA |
| | KH7 | GAGAAA | | KH18 | GTAACC |
| 33 | E51SaCas9K | ATAACTTGATCAAGCA | 45 | E51SaCas9K | TAGTAACCACAGGTTG |
| | KH7 | GAGAAA | | KH19 | TGTCAC |
| 33 | E51SaCas9K | ATAACTTGATCAAGCA | 46 | E51SaCas9K | CCACAGGTTGTGTCAC |
| | KH7 | GAGAAA | | KH20 | CAGAGT |
| 33 | E51SaCas9K | ATAACTTGATCAAGCA | 47 | E51SaCas9K | GTTGTGTCACCAGAGT |
| | KH7 | GAGAAA | | KH21 | AACAGT |
| 33 | E51SaCas9K | ATAACTTGATCAAGCA | 48 | E51SaCas9K | GAGTAACAGTCTGAGT |
| | KH7 | GAGAAA | | KH22 | AGGAGC |
| 33 | E51SaCas9K | ATAACTTGATCAAGCA | 53 | E51SaCas9K | TCAACGAGATGATCAT |
| | KH7 | GAGAAA | | KH27 | CAAGCA |
| 33 | E51SaCas9K | ATAACTTGATCAAGCA | 54 | E51SaCas9K | GTGACCTTGAGGATAT |
| | KH7 | GAGAAA | | KH28 | CAACGA |
| 33 | E51SaCas9K | ATAACTTGATCAAGCA | 55 | E51SaCas9K | TGGGTGACCTTGAGGA |
| | KH7 | GAGAAA | | KH29 | TATCAA |
| 33 | E51SaCas9K | ATAACTTGATCAAGCA | 56 | E51SaCas9K | GAGGGTGATGGTGGGT |
| | KH7 | GAGAAA | | KH30 | GACCTT |
| 33 | E51SaCas9K | ATAACTTGATCAAGCA | 57 | E51SaCas9K | TATAAAATCACAGAGG |
| | KH7 | GAGAAA | | KH31 | GTGATG |
| 33 | E51SaCas9K | ATAACTTGATCAAGCA | 58 | E51SaCas9K | AAGTTATAAAATCACA |
| | KH7 | GAGAAA | | KH32 | GAGGGT |
| 33 | E51SaCas9K | ATAACTTGATCAAGCA | 59 | E51SaCas9K | ATCAAGTTATAAAATC |
| | KH7 | GAGAAA | | KH33 | ACAGAG |
| 33 | E51SaCas9K | ATAACTTGATCAAGCA | 60 | E51SaCas9K | TTGATCAAGTTATAAA |
| | KH7 | GAGAAA | | KH34 | ATCACA |
| 33 | E51SaCas9K | ATAACTTGATCAAGCA | 61 | E51SaCas9K | CTTTCTCTGCTTGATC |
| | KH7 | GAGAAA | | KH35 | AAGTTA |
| 33 | E51SaCas9K | ATAACTTGATCAAGCA | 62 | E51SaCas9K | CCGACTGGCTTTCTCT |
| | KH7 | GAGAAA | | KH36 | GCTTGA |
| 33 | E51SaCas9K | ATAACTTGATCAAGCA | 63 | E51SaCas9K | ACTTACCGACTGGCTT |
| | KH7 | GAGAAA | | KH37 | TCTCTG |
| 33 | E51SaCas9K | ATAACTTGATCAAGCA | 64 | E51SaCas9K | GATGTTGGAGGTACCT |
| | KH7 | GAGAAA | | KH38 | GCTCTG |
| 33 | E51SaCas9K | ATAACTTGATCAAGCA | 65 | E51SaCas9K | AAATGCCATCTTCCTT |
| | KH7 | GAGAAA | | KH39 | GATGTT |
| 33 | E51SaCas9K | ATAACTTGATCAAGCA | 66 | E51SaCas9K | CCAAACTAGAAATGCC |
| | KH7 | GAGAAA | | KH40 | ATCTTC |
| 33 | E51SaCas9K | ATAACTTGATCAAGCA | 67 | E51SaCas9K | AGGAAACTGCCATCTC |
| | KH7 | GAGAAA | | KH41 | CAAACT |
| 33 | E51SaCas9K | ATAACTTGATCAAGCA | 68 | E51SaCas9K | CTGTTACTCTGGTGAC |
| | KH7 | GAGAAA | | KH42 | ACAACC |
| 33 | E51SaCas9K | ATAACTTGATCAAGCA | 69 | E51SaCas9K | TAGCTCCTACTCAGAC |
| | KH7 | GAGAAA | | KH43 | TGTTAC |
| 34 | E51SaCas9K | CTTGATCAAGCAGAGA | 35 | E51SaCas9K | ATCAAGCAGAGAAAGC |
| | KH8 | AAGCCA | | KH9 | CAGTCG |
| 34 | E51SaCas9K | CTTGATCAAGCAGAGA | 36 | E51SaCas9K | CAGTCGGTAAGTTCTG |
| | KH8 | AAGCCA | | KH10 | TCCAAG |
| 34 | E51SaCas9K | CTTGATCAAGCAGAGA | 37 | E51SaCas9K | GTAAGTTCTGTCCAAG |
| | KH8 | AAGCCA | | KH11 | CCCGGT |
| 34 | E51SaCas9K | CTTGATCAAGCAGAGA | 38 | E51SaCas9K | AGCCCGGTTGAAATCT |
| | KH8 | AAGCCA | | KH12 | GCCAGA |
| 34 | E51SaCas9K | CTTGATCAAGCAGAGA | 39 | E51SaCas9K | AGCAGGTACCTCCAAC |
| | KH8 | AAGCCA | | KH13 | ATCAAG |
| 34 | E51SaCas9K | CTTGATCAAGCAGAGA | 4C | E51SaCas9K | CAACATCAAGGAAGAT |
| | KH8 | AAGCCA | | KH14 | GGCATT |
| 34 | E51SaCas9K | CTTGATCAAGCAGAGA | 41 | E51SaCas9K | AGGAAGATGGCATTTC |
| | KH8 | AAGCCA | | KH15 | TAGTTT |
| 34 | E51SaCas9K | CTTGATCAAGCAGAGA | 42 | E51SaCas9K | ATGGCATTTCTAGTTT |
| | KH8 | AAGCCA | | KH16 | GGAGAT |
| 34 | E51SaCas9K | CTTGATCAAGCAGAGA | 43 | E51SaCas9K | CTAGTTTGGAGATGGC |
| | KH8 | AAGCCA | | KH17 | AGTTTC |
| 34 | E51SaCas9K | CTTGATCAAGCAGAGA | 44 | E51SaCas9K | GATGGCAGTTTCCTTA |
| | KH8 | AAGCCA | | KH18 | GTAACC |
| 34 | E51SaCas9K | CTTGATCAAGCAGAGA | 45 | E51SaCas9K | TAGTAACCACAGGTTG |
| | KH8 | AAGCCA | | KH19 | TGTCAC |
| 34 | E51SaCas9K | CTTGATCAAGCAGAGA | 46 | E51SaCas9K | CCACAGGTTGTGTCAC |
| | KH8 | AAGCCA | | KH20 | CAGAGT |
| 34 | E51SaCas9K | CTTGATCAAGCAGAGA | 47 | E51SaCas9K | GTTGTGTCACCAGAGT |
| | KH8 | AAGCCA | | KH21 | AACAGT |
| 34 | E51SaCas9K | CTTGATCAAGCAGAGA | 48 | E51SaCas9K | GAGTAACAGTCTGAGT |
| | KH8 | AAGCCA | | KH22 | AGGAGC |
| 34 | E51SaCas9K | CTTGATCAAGCAGAGA | 53 | E51SaCas9K | TCAACGAGATGATCAT |
| | KH8 | AAGCCA | | KH27 | CAAGCA |
| 34 | E51SaCas9K | CTTGATCAAGCAGAGA | 54 | E51SaCas9K | GTGACCTTGAGGATAT |
| | KH8 | AAGCCA | | KH28 | CAACGA |
| 34 | E51SaCas9K | CTTGATCAAGCAGAGA | 55 | E51SaCas9K | TGGGTGACCTTGAGGA |
| | KH8 | AAGCCA | | KH29 | TATCAA |
| 34 | E51SaCas9K | CTTGATCAAGCAGAGA | 56 | E51SaCas9K | GAGGGTGATGGTGGGT |
| | KH8 | AAGCCA | | KH30 | GACCTT |
| 34 | E51SaCas9K | CTTGATCAAGCAGAGA | 57 | E51SaCas9K | TATAAAATCACAGAGG |
| | KH8 | AAGCCA | | KH31 | GTGATG |
| 34 | E51SaCas9K | CTTGATCAAGCAGAGA | 58 | E51SaCas9K | AAGTTATAAAATCACA |
| | KH8 | AAGCCA | | KH32 | GAGGGT |
| 34 | E51SaCas9K | CTTGATCAAGCAGAGA | 59 | E51SaCas9K | ATCAAGTTATAAAATC |
| | KH8 | AAGCCA | | KH33 | ACAGAG |
| 34 | E51SaCas9K | CTTGATCAAGCAGAGA | 60 | E51SaCas9K | TTGATCAAGTTATAAA |
| | KH8 | AAGCCA | | KH34 | ATCACA |
| 34 | E51SaCas9K | CTTGATCAAGCAGAGA | 61 | E51SaCas9K | CTTTCTCTGCTTGATC |
| | KH8 | AAGCCA | | KH35 | AAGTTA |
| 34 | E51SaCas9K | CTTGATCAAGCAGAGA | 62 | E51SaCas9K | CCGACTGGCTTTCTCT |
| | KH8 | AAGCCA | | KH36 | GCTTGA |
| 34 | E51SaCas9K | CTTGATCAAGCAGAGA | 63 | E51SaCas9K | ACTTACCGACTGGCTT |
| | KH8 | AAGCCA | | KH37 | TCTCTG |
| 34 | E51SaCas9K | CTTGATCAAGCAGAGA | 64 | E51SaCas9K | GATGTTGGAGGTACCT |
| | KH8 | AAGCCA | | KH38 | GCTCTG |
| 34 | E51SaCas9K | CTTGATCAAGCAGAGA | 65 | E51SaCas9K | AAATGCCATCTTCCTT |
| | KH8 | AAGCCA | | KH39 | GATGTT |
| 34 | E51SaCas9K | CTTGATCAAGCAGAGA | 66 | E51SaCas9K | CCAAACTAGAAATGCC |
| | KH8 | AAGCCA | | KH40 | ATCTTC |
| 34 | E51SaCas9K | CTTGATCAAGCAGAGA | 67 | E51SaCas9K | AGGAAACTGCCATCTC |
| | KH8 | AAGCCA | | KH41 | CAAACT |
| 34 | E51SaCas9K | CTTGATCAAGCAGAGA | 68 | E51SaCas9K | CTGTTACTCTGGTGAC |
| | KH8 | AAGCCA | | KH42 | ACAACC |
| 34 | E51SaCas9K | CTTGATCAAGCAGAGA | 69 | E51SaCas9K | TAGCTCCTACTCAGAC |
| | KH8 | AAGCCA | | KH43 | TGTTAC |
| 35 | E51SaCas9K | ATCAAGCAGAGAAAGC | 36 | E51SaCas9K | CAGTCGGTAAGTTCTG |
| | KH9 | CAGTCG | | KH10 | TCCAAG |
| 35 | E51SaCas9K | ATCAAGCAGAGAAAGC | 37 | E51SaCas9K | GTAAGTTCTGTCCAAG |
| | KH9 | CAGTCG | | KH11 | CCCGGT |
| 35 | E51SaCas9K | ATCAAGCAGAGAAAGC | 38 | E51SaCas9K | AGCCCGGTTGAAATCT |
| | KH9 | CAGTCG | | KH12 | GCCAGA |
| 35 | E51SaCas9K | ATCAAGCAGAGAAAGC | 39 | E51SaCas9K | AGCAGGTACCTCCAAC |
| | KH9 | CAGTCG | | KH13 | ATCAAG |
| 35 | E51SaCas9K | ATCAAGCAGAGAAAGC | 40 | E51SaCas9K | CAACATCAAGGAAGAT |
| | KH9 | CAGTCG | | KH14 | GGCATT |
| 35 | E51SaCas9K | ATCAAGCAGAGAAAGC | 41 | E51SaCas9K | AGGAAGATGGCATTTC |
| | KH9 | CAGTCG | | KH15 | TAGTTT |
| 35 | E51SaCas9K | ATCAAGCAGAGAAAGC | 42 | E51SaCas9K | ATGGCATTTCTAGTTT |
| | KH9 | CAGTCG | | KH16 | GGAGAT |
| 35 | E51SaCas9K | ATCAAGCAGAGAAAGC | 43 | E51SaCas9K | CTAGTTTGGAGATGGC |
| | KH9 | CAGTCG | | KH17 | AGTTTC |
| 35 | E51SaCas9K | ATCAAGCAGAGAAAGC | 44 | E51SaCas9K | GATGGCAGTTTCCTTA |
| | KH9 | CAGTCG | | KH18 | GTAACC |
| 35 | E51SaCas9K | ATCAAGCAGAGAAAGC | 45 | E51SaCas9K | TAGTAACCACAGGTTG |
| | KH9 | CAGTCG | | KH19 | TGTCAC |
| 35 | E51SaCas9K | ATCAAGCAGAGAAAGC | 46 | E51SaCas9K | CCACAGGTTGTGTCAC |
| | KH9 | CAGTCG | | KH20 | CAGAGT |
| 35 | E51SaCas9K | ATCAAGCAGAGAAAGC | 47 | E51SaCas9K | GTTGTGTCACCAGAGT |
| | KH9 | CAGTCG | | KH21 | AACAGT |
| 35 | E51SaCas9K | ATCAAGCAGAGAAAGC | 48 | E51SaCas9K | GAGTAACAGTCTGAGT |
| | KH9 | CAGTCG | | KH22 | AGGAGC |
| 35 | E51SaCas9K | ATCAAGCAGAGAAAGC | 53 | E51SaCas9K | TCAACGAGATGATCAT |
| | KH9 | CAGTCG | | KH27 | CAAGCA |
| 35 | E51SaCas9K | ATCAAGCAGAGAAAGC | 54 | E51SaCas9K | GTGACCTTGAGGATAT |
| | KH9 | CAGTCG | | KH28 | CAACGA |
| 35 | E51SaCas9K | ATCAAGCAGAGAAAGC | 55 | E51SaCas9K | TGGGTGACCTTGAGGA |
| | KH9 | CAGTCG | | KH29 | TATCAA |
| 35 | E51SaCas9K | ATCAAGCAGAGAAAGC | 56 | E51SaCas9K | GAGGGTGATGGTGGGT |
| | KH9 | CAGTCG | | KH30 | GACCTT |
| 35 | E51SaCas9K | ATCAAGCAGAGAAAGC | 57 | E51SaCas9K | TATAAAATCACAGAGG |
| | KH9 | CAGTCG | | KH31 | GTGATG |
| 35 | E51SaCas9K | ATCAAGCAGAGAAAGC | 58 | E51SaCas9K | AAGTTATAAAATCACA |
| | KH9 | CAGTCG | | KH32 | GAGGGT |
| 35 | E51SaCas9K | ATCAAGCAGAGAAAGC | 59 | E51SaCas9K | ATCAAGTTATAAAATC |
| | KH9 | CAGTCG | | KH33 | ACAGAG |
| 35 | E51SaCas9K | ATCAAGCAGAGAAAGC | 60 | E51SaCas9K | TTGATCAAGTTATAAA |
| | KH9 | CAGTCG | | KH34 | ATCACA |
| 35 | E51SaCas9K | ATCAAGCAGAGAAAGC | 61 | E51SaCas9K | CTTTCTCTGCTTGATC |
| | KH9 | CAGTCG | | KH35 | AAGTTA |
| 35 | E51SaCas9K | ATCAAGCAGAGAAAGC | 62 | E51SaCas9K | CCGACTGGCTTTCTCT |
| | KH9 | CAGTCG | | KH36 | GCTTGA |
| 35 | E51SaCas9K | ATCAAGCAGAGAAAGC | 63 | E51SaCas9K | ACTTACCGACTGGCTT |
| | KH9 | CAGTCG | | KH37 | TCTCTG |
| 35 | E51SaCas9K | ATCAAGCAGAGAAAGC | 64 | E51SaCas9K | GATGTTGGAGGTACCT |
| | KH9 | CAGTCG | | KH38 | GCTCTG |
| 35 | E51SaCas9K | ATCAAGCAGAGAAAGC | 65 | E51SaCas9K | AAATGCCATCTTCCTT |
| | KH9 | CAGTCG | | KH39 | GATGTT |
| 35 | E51SaCas9K | ATCAAGCAGAGAAAGC | 66 | E51SaCas9K | CCAAACTAGAAATGCC |
| | KH9 | CAGTCG | | KH40 | ATCTTC |
| 35 | E51SaCas9K | ATCAAGCAGAGAAAGC | 67 | E51SaCas9K | AGGAAACTGCCATCTC |
| | KH9 | CAGTCG | | KH41 | CAAACT |
| 35 | E51SaCas9K | ATCAAGCAGAGAAAGC | 68 | E51SaCas9K | CTGTTACTCTGGTGAC |
| | KH9 | CAGTCG | | KH42 | ACAACC |
| 35 | E51SaCas9K | ATCAAGCAGAGAAAGC | 69 | E51SaCas9K | TAGCTCCTACTCAGAC |
| | KH9 | CAGTCG | | KH43 | TGTTAC |
| 36 | E51SaCas9K | CAGTCGGTAAGTTCTG | 37 | E51SaCas9K | GTAAGTTCTGTCCAAG |
| | KH10 | TCCAAG | | KH11 | CCCGGT |
| 36 | E51SaCas9K | CAGTCGGTAAGTTCTG | 38 | E51SaCas9K | AGCCCGGTTGAAATCT |
| | KH10 | TCCAAG | | KH12 | GCCAGA |
| 36 | E51SaCas9K | CAGTCGGTAAGTTCTG | 39 | E51SaCas9K | AGCAGGTACCTCCAAC |
| | KH10 | TCCAAG | | KH13 | ATCAAG |
| 36 | E51SaCas9K | CAGTCGGTAAGTTCTG | 40 | E51SaCas9K | CAACATCAAGGAAGAT |
| | KH10 | TCCAAG | | KH14 | GGCATT |
| 36 | E51SaCas9K | CAGTCGGTAAGTTCTG | 41 | E51SaCas9K | AGGAAGATGGCATTTC |
| | KH10 | TCCAAG | | KH15 | TAGTTT |
| 36 | E51SaCas9K | CAGTCGGTAAGTTCTG | 42 | E51SaCas9K | ATGGCATTTCTAGTTT |
| | KH10 | TCCAAG | | KH16 | GGAGAT |
| 36 | E51SaCas9K | CAGTCGGTAAGTTCTG | 43 | E51SaCas9K | CTAGTTTGGAGATGGC |
| | KH10 | TCCAAG | | KH17 | AGTTTC |
| 36 | E51SaCas9K | CAGTCGGTAAGTTCTG | 44 | E51SaCas9K | GATGGCAGTTTCCTTA |
| | KH10 | TCCAAG | | KH18 | GTAACC |
| 36 | E51SaCas9K | CAGTCGGTAAGTTCTG | 45 | E51SaCas9K | TAGTAACCACAGGTTG |
| | KH10 | TCCAAG | | KH19 | TGTCAC |
| 36 | E51SaCas9K | CAGTCGGTAAGTTCTG | 46 | E51SaCas9K | CCACAGGTTGTGTCAC |
| | KH10 | TCCAAG | | KH20 | CAGAGT |
| 36 | E51SaCas9K | CAGTCGGTAAGTTCTG | 47 | E51SaCas9K | GTTGTGTCACCAGAGT |
| | KH10 | TCCAAG | | KH21 | AACAGT |
| 36 | E51SaCas9K | CAGTCGGTAAGTTCTG | 48 | E51SaCas9K | GAGTAACAGTCTGAGT |
| | KH10 | TCCAAG | | KH22 | AGGAGC |
| 36 | E51SaCas9K | CAGTCGGTAAGTTCTG | 5.3 | E51SaCas9K | TCAACGAGATGATCAT |
| | KH10 | TCCAAG | | KH27 | CAAGCA |
| 36 | E51SaCas9K | CAGTCGGTAAGTTCTG | 54 | E51SaCas9K | GTGACCTTGAGGATAT |
| | KH10 | TCCAAG | | KH28 | CAACGA |
| 36 | E51SaCas9K | CAGTCGGTAAGTTCTG | 55 | E51SaCas9K | TGGGTGACCTTGAGGA |
| | KH10 | TCCAAG | | KH29 | TATCAA |
| 36 | E51SaCas9K | CAGTCGGTAAGTTCTG | 56 | E51SaCas9K | GAGGGTGATGGTGGGT |
| | KH10 | TCCAAG | | KH30 | GACCTT |
| 36 | E51SaCas9K | CAGTCGGTAAGTTCTG | 57 | E51SaCas9K | TATAAAATCACAGAGG |
| | KH10 | TCCAAG | | KH31 | GTGATG |
| 36 | E51SaCas9K | CAGTCGGTAAGTTCTG | 58 | E51SaCas9K | AAGTTATAAAATCACA |
| | KH10 | TCCAAG | | KH32 | GAGGGT |
| 36 | E51SaCas9K | CAGTCGGTAAGTTCTG | 59 | E51SaCas9K | ATCAAGTTATAAAATC |
| | KH10 | TCCAAG | | KH33 | ACAGAG |
| 36 | E51SaCas9K | CAGTCGGTAAGTTCTG | 60 | E51SaCas9K | TTGATCAAGTTATAAA |
| | KH10 | TCCAAG | | KH34 | ATCACA |
| 36 | E51SaCas9K | CAGTCGGTAAGTTCTG | 61 | E51SaCas9K | CTTTCTCTGCTTGATC |
| | KH10 | TCCAAG | | KH35 | AAGTTA |
| 36 | E51SaCas9K | CAGTCGGTAAGTTCTG | 62 | E51SaCas9K | CCGACTGGCTTTCTCT |
| | KH10 | TCCAAG | | KH36 | GCTTGA |
| 36 | E51SaCas9K | CAGTCGGTAAGTTCTG | 63 | E51SaCas9K | ACTTACCGACTGGCTT |
| | KH10 | TCCAAG | | KH37 | TCTCTG |
| 36 | E51SaCas9K | CAGTCGGTAAGTTCTG | 64 | E51SaCas9K | GATGTTGGAGGTACCT |
| | KH10 | TCCAAG | | KH38 | GCTCTG |
| 36 | E51SaCas9K | CAGTCGGTAAGTTCTG | 65 | E51SaCas9K | AAATGCCATCTTCCTT |
| | KH10 | TCCAAG | | KH39 | GATGTT |
| 36 | E51SaCas9K | CAGTCGGTAAGTTCTG | 66 | E51SaCas9K | CCAAACTAGAAATGCC |
| | KH10 | TCCAAG | | KH40 | ATCTTC |
| 36 | E51SaCas9K | CAGTCGGTAAGTTCTG | 67 | E51SaCas9K | AGGAAACTGCCATCTC |
| | KH10 | TCCAAG | | KH41 | CAAACT |
| 36 | E51SaCas9K | CAGTCGGTAAGTTCTG | 68 | E51SaCas9K | CTGTTACTCTGGTGAC |
| | KH10 | TCCAAG | | KH42 | ACAACC |
| 36 | E51SaCas9K | CAGTCGGTAAGTTCTG | 69 | E51SaCas9K | TAGCTCCTACTCAGAC |
| | KH10 | TCCAAG | | KH43 | TGTTAC |
| 37 | E51SaCas9K | GTAAGTTCTGTCCAAG | 38 | E51SaCas9K | AGCCCGGTTGAAATCT |
| | KH11 | CCCGGT | | KH12 | GCCAGA |
| 37 | E51SaCas9K | GTAAGTTCTGTCCAAG | 39 | E51SaCas9K | AGCAGGTACCTCCAAC |
| | KH11 | CCCGGT | | KH13 | ATCAAG |
| 37 | E51SaCas9K | GTAAGTTCTGTCCAAG | 40 | E51SaCas9K | CAACATCAAGGAAGAT |
| | KH11 | CCCGGT | | KH14 | GGCATT |
| 37 | E51SaCas9K | GTAAGTTCTGTCCAAG | 41 | E51SaCas9K | AGGAAGATGGCATTTC |
| | KH11 | CCCGGT | | KH15 | TAGTTT |
| 37 | E51SaCas9K | GTAAGTTCTGTCCAAG | 42 | E51SaCas9K | ATGGCATTTCTAGTTT |
| | KH11 | CCCGGT | | KH16 | GGAGAT |
| 37 | E51SaCas9K | GTAAGTTCTGTCCAAG | 43 | E51SaCas9K | CTAGTTTGGAGATGGC |
| | KH11 | CCCGGT | | KH17 | AGTTTC |
| 37 | E51SaCas9K | GTAAGTTCTGTCCAAG | 44 | E51SaCas9K | GATGGCAGTTTCCTTA |
| | KH11 | CCCGGT | | KH18 | GTAACC |
| 37 | E51SaCas9K | GTAAGTTCTGTCCAAG | 45 | E51SaCas9K | TAGTAACCACAGGTTG |
| | KH11 | CCCGGT | | KH19 | TGTCAC |
| 37 | E51SaCas9K | GTAAGTTCTGTCCAAG | 46 | E51SaCas9K | CCACAGGTTGTGTCAC |
| | KH11 | CCCGGT | | KH20 | CAGAGT |
| 37 | E51SaCas9K | GTAAGTTCTGTCCAAG | 47 | E51SaCas9K | GTTGTGTCACCAGAGT |
| | KH11 | CCCGGT | | KH21 | AACAGT |
| 37 | E51SaCas9K | GTAAGTTCTGTCCAAG | 48 | E51SaCas9K | GAGTAACAGTCTGAGT |
| | KH11 | CCCGGT | | KH22 | AGGAGC |
| 37 | E51SaCas9K | GTAAGTTCTGTCCAAG | 53 | E51SaCas9K | TCAACGAGATGATCAT |
| | KH11 | CCCGGT | | KH27 | CAAGCA |
| 37 | E51SaCas9K | GTAAGTTCTGTCCAAG | 54 | E51SaCas9K | GTGACCTTGAGGATAT |
| | KH11 | CCCGGT | | KH28 | CAACGA |
| 37 | E51SaCas9K | GTAAGTTCTGTCCAAG | 55 | E51SaCas9K | TGGGTGACCTTGAGGA |
| | KH11 | CCCGGT | | KH29 | TATCAA |
| 37 | E51SaCas9K | GTAAGTTCTGTCCAAG | 56 | E51SaCas9K | GAGGGTGATGGTGGGT |
| | KH11 | CCCGGT | | KH30 | GACCTT |
| 37 | E51SaCas9K | GTAAGTTCTGTCCAAG | 57 | E51SaCas9K | TATAAAATCACAGAGG |
| | KH11 | CCCGGT | | KH31 | GTGATG |
| 37 | E51SaCas9K | GTAAGTTCTGTCCAAG | 58 | E51SaCas9K | AAGTTATAAAATCACA |
| | KH11 | CCCGGT | | KH32 | GAGGGT |
| 37 | E51SaCas9K | GTAAGTTCTGTCCAAG | 59 | E51SaCas9K | ATCAAGTTATAAAATC |
| | KH11 | CCCGGT | | KH33 | ACAGAG |
| 37 | E51SaCas9K | GTAAGTTCTGTCCAAG | 60 | E51SaCas9K | TTGATCAAGTTATAAA |
| | KH11 | CCCGGT | | KH34 | ATCACA |
| 37 | E51SaCas9K | GTAAGTTCTGTCCAAG | 61 | E51SaCas9K | CTTTCTCTGCTTGATC |
| | KH11 | CCCGGT | | KH35 | AAGTTA |
| 37 | E51SaCas9K | GTAAGTTCTGTCCAAG | 62 | E51SaCas9K | CCGACTGGCTTTCTCT |
| | KH11 | CCCGGT | | KH36 | GCTTGA |
| 37 | E51SaCas9K | GTAAGTTCTGTCCAAG | 63 | E51SaCas9K | ACTTACCGACTGGCTT |
| | KH11 | CCCGGT | | KH37 | TCTCTG |
| 37 | E51SaCas9K | GTAAGTTCTGTCCAAG | 64 | E51SaCas9K | GATGTTGGAGGTACCT |
| | KH11 | CCCGGT | | KH38 | GCTCTG |
| 37 | E51SaCas9K | GTAAGTTCTGTCCAAG | 65 | E51SaCas9K | AAATGCCATCTTCCTT |
| | KH11 | CCCGGT | | KH39 | GATGTT |
| 37 | E51SaCas9K | GTAAGTTCTGTCCAAG | 66 | E51SaCas9K | CCAAACTAGAAATGCC |
| | KH11 | CCCGGT | | KH40 | ATCTTC |
| 37 | E51SaCas9K | GTAAGTTCTGTCCAAG | 67 | E51SaCas9K | AGGAAACTGCCATCTC |
| | KH11 | CCCGGT | | KH41 | CAAACT |
| 37 | E51SaCas9K | GTAAGTTCTGTCCAAG | 68 | E51SaCas9K | CTGTTACTCTGGTGAC |
| | KH11 | CCCGGT | | KH42 | ACAACC |
| 37 | E51SaCas9K | GTAAGTTCTGTCCAAG | 69 | E51SaCas9K | TAGCTCCTACTCAGAC |
| | KH11 | CCCGGT | | KH43 | TGTTAC |
| 38 | E51SaCas9K | AGCCCGGTTGAAATCT | 39 | E51SaCas9K | AGCAGGTACCTCCAAC |
| | KH12 | GCCAGA | | KH13 | ATCAAG |
| 38 | E51SaCas9K | AGCCCGGTTGAAATCT | 40 | E51SaCas9K | CAACATCAAGGAAGAT |
| | KH12 | GCCAGA | | KH14 | GGCATT |
| 38 | E51SaCas9K | AGCCCGGTTGAAATCT | 41 | E51SaCas9K | AGGAAGATGGCATTTC |
| | KH12 | GCCAGA | | KH15 | TAGTTT |
| 38 | E51SaCas9K | AGCCCGGTTGAAATCT | 42 | E51SaCas9K | ATGGCATTTCTAGTTT |
| | KH12 | GCCAGA | | KH16 | GGAGAT |
| 38 | E51SaCas9K | AGCCCGGTTGAAATCT | 43 | E51SaCas9K | CTAGTTTGGAGATGGC |
| | KH12 | GCCAGA | | KH17 | AGTTTC |
| 38 | E51SaCas9K | AGCCCGGTTGAAATCT | 44 | E51SaCas9K | GATGGCAGTTTCCTTA |
| | KH12 | GCCAGA | | KH18 | GTAACC |
| 38 | E51SaCas9K | AGCCCGGTTGAAATCT | 45 | E51SaCas9K | TAGTAACCACAGGTTG |
| | KH12 | GCCAGA | | KH19 | TGTCAC |
| 38 | E51SaCas9K | AGCCCGGTTGAAATCT | 46 | E51SaCas9K | CCACAGGTTGTGTCAC |
| | KH12 | GCCAGA | | KH20 | CAGAGT |
| 38 | E51SaCas9K | AGCCCGGTTGAAATCT | 47 | E51SaCas9K | GTTGTGTCACCAGAGT |
| | KH12 | GCCAGA | | KH21 | AACAGT |
| 38 | E51SaCas9K | AGCCCGGTTGAAATCT | 48 | E51SaCas9K | GAGTAACAGTCTGAGT |
| | KH12 | GCCAGA | | KH22 | AGGAGC |
| 38 | E51SaCas9K | AGCCCGGTTGAAATCT | 53 | E51SaCas9K | TCAACGAGATGATCAT |
| | KH12 | GCCAGA | | KH27 | CAAGCA |
| 38 | E51SaCas9K | AGCCCGGTTGAAATCT | 54 | E51SaCas9K | GTGACCTTGAGGATAT |
| | KH12 | GCCAGA | | KH28 | CAACGA |
| 38 | E51SaCas9K | AGCCCGGTTGAAATCT | 55 | E51SaCas9K | TGGGTGACCTTGAGGA |
| | KH12 | GCCAGA | | KH29 | TATCAA |
| 38 | E51SaCas9K | AGCCCGGTTGAAATCT | 56 | E51SaCas9K | GAGGGTGATGGTGGGT |
| | KH12 | GCCAGA | | KH30 | GACCTT |
| 38 | E51SaCas9K | AGCCCGGTTGAAATCT | 57 | E51SaCas9K | TATAAAATCACAGAGG |
| | KH12 | GCCAGA | | KH31 | GTGATG |
| 38 | E51SaCas9K | AGCCCGGTTGAAATCT | 58 | E51SaCas9K | AAGTTATAAAATCACA |
| | KH12 | GCCAGA | | KH32 | GAGGGT |
| 38 | E51SaCas9K | AGCCCGGTTGAAATCT | 59 | E51SaCas9K | ATCAAGTTATAAAATC |
| | KH12 | GCCAGA | | KH33 | ACAGAG |
| 38 | E51SaCas9K | AGCCCGGTTGAAATCT | 60 | E51SaCas9K | TTGATCAAGTTATAAA |
| | KH12 | GCCAGA | | KH34 | ATCACA |
| 38 | E51SaCas9K | AGCCCGGTTGAAATCT | 61 | E51SaCas9K | CTTTCTCTGCTTGATC |
| | KH12 | GCCAGA | | KH35 | AAGTTA |
| 38 | E51SaCas9K | AGCCCGGTTGAAATCT | 62 | E51SaCas9K | CCGACTGGCTTTCTCT |
| | KH12 | GCCAGA | | KH36 | GCTTGA |
| 38 | E51SaCas9K | AGCCCGGTTGAAATCT | 63 | E51SaCas9K | ACTTACCGACTGGCTT |
| | KH12 | GCCAGA | | KH37 | TCTCTG |
| 38 | E51SaCas9K | AGCCCGGTTGAAATCT | 64 | E51SaCas9K | GATGTTGGAGGTACCT |
| | KH12 | GCCAGA | | KH38 | GCTCTG |
| 38 | E51SaCas9K | AGCCCGGTTGAAATCT | 65 | E51SaCas9K | AAATGCCATCTTCCTT |
| | KH12 | GCCAGA | | KH39 | GATGTT |
| 38 | E51SaCas9K | AGCCCGGTTGAAATCT | 66 | E51SaCas9K | CCAAACTAGAAATGCC |
| | KH12 | GCCAGA | | KH40 | ATCTTC |
| 38 | E51SaCas9K | AGCCCGGTTGAAATCT | 67 | E51SaCas9K | AGGAAACTGCCATCTC |
| | KH12 | GCCAGA | | KH41 | CAAACT |
| 38 | E51SaCas9K | AGCCCGGTTGAAATCT | 68 | E51SaCas9K | CTGTTACTCTGGTGAC |
| | KH12 | GCCAGA | | KH42 | ACAACC |
| 38 | E51SaCas9K | AGCCCGGTTGAAATCT | 69 | E51SaCas9K | TAGCTCCTACTCAGAC |
| | KH12 | GCCAGA | | KH43 | TGTTAC |
| 39 | E51SaCas9K | AGCAGGTACCTCCAAC | 40 | E51SaCas9K | CAACATCAAGGAAGAT |
| | KH13 | ATCAAG | | KH14 | GGCATT |
| 39 | E51SaCas9K | AGCAGGTACCTCCAAC | 41 | E51SaCas9K | AGGAAGATGGCATTTC |
| | KH13 | ATCAAG | | KH15 | TAGTTT |
| 39 | E51SaCas9K | AGCAGGTACCTCCAAC | 42 | E51SaCas9K | ATGGCATTTCTAGTTT |
| | KH13 | ATCAAG | | KH16 | GGAGAT |
| 39 | E51SaCas9K | AGCAGGTACCTCCAAC | 43 | E51SaCas9K | CTAGTTTGGAGATGGC |
| | KH13 | ATCAAG | | KH17 | AGTTTC |
| 39 | E51SaCas9K | AGCAGGTACCTCCAAC | 44 | E51SaCas9K | GATGGCAGTTTCCTTA |
| | KH13 | ATCAAG | | KH18 | GTAACC |
| 39 | E51SaCas9K | AGCAGGTACCTCCAAC | 45 | E51SaCas9K | TAGTAACCACAGGTTG |
| | KH13 | ATCAAG | | KH19 | TGTCAC |
| 39 | E51SaCas9K | AGCAGGTACCTCCAAC | 46 | E51SaCas9K | CCACAGGTTGTGTCAC |
| | KH13 | ATCAAG | | KH20 | CAGAGT |
| 39 | E51SaCas9K | AGCAGGTACCTCCAAC | 47 | E51SaCas9K | GTTGTGTCACCAGAGT |
| | KH13 | ATCAAG | | KH21 | AACAGT |
| 39 | E51SaCas9K | AGCAGGTACCTCCAAC | 48 | E51SaCas9K | GAGTAACAGTCTGAGT |
| | KH13 | ATCAAG | | KH22 | AGGAGC |
| 39 | E51SaCas9K | AGCAGGTACCTCCAAC | 53 | E51SaCas9K | TCAACGAGATGATCAT |
| | KH13 | ATCAAG | | KH27 | CAAGCA |
| 39 | E51SaCas9K | AGCAGGTACCTCCAAC | 54 | E51SaCas9K | GTGACCTTGAGGATAT |
| | KH13 | ATCAAG | | KH28 | CAACGA |
| 39 | E51SaCas9K | AGCAGGTACCTCCAAC | 55 | E51SaCas9K | TGGGTGACCTTGAGGA |
| | KH13 | ATCAAG | | KH29 | TATCAA |
| 39 | E51SaCas9K | AGCAGGTACCTCCAAC | 56 | E51SaCas9K | GAGGGTGATGGTGGGT |
| | KH13 | ATCAAG | | KH30 | GACCTT |
| 39 | E51SaCas9K | AGCAGGTACCTCCAAC | 57 | E51SaCas9K | TATAAAATCACAGAGG |
| | KH13 | ATCAAG | | KH31 | GTGATG |
| 39 | E51SaCas9K | AGCAGGTACCTCCAAC | 58 | E51SaCas9K | AAGTTATAAAATCACA |
| | KH13 | ATCAAG | | KH32 | GAGGGT |
| 39 | E51SaCas9K | AGCAGGTACCTCCAAC | 59 | E51SaCas9K | ATCAAGTTATAAAATC |
| | KH13 | ATCAAG | | KH33 | ACAGAG |
| 39 | E51SaCas9K | AGCAGGTACCTCCAAC | 60 | E51SaCas9K | TTGATCAAGTTATAAA |
| | KH13 | ATCAAG | | KH34 | ATCACA |
| 39 | E51SaCas9K | AGCAGGTACCTCCAAC | 61 | E51SaCas9K | CTTTCTCTGCTTGATC |
| | KH13 | ATCAAG | | KH35 | AAGTTA |
| 39 | E51SaCas9K | AGCAGGTACCTCCAAC | 62 | E51SaCas9K | CCGACTGGCTTTCTCT |
| | KH13 | ATCAAG | | KH36 | GCTTGA |
| 39 | E51SaCas9K | AGCAGGTACCTCCAAC | 63 | E51SaCas9K | ACTTACCGACTGGCTT |
| | KH13 | ATCAAG | | KH37 | TCTCTG |
| 39 | E51SaCas9K | AGCAGGTACCTCCAAC | 64 | E51SaCas9K | GATGTTGGAGGTACCT |
| | KH13 | ATCAAG | | KH38 | GCTCTG |
| 39 | E51SaCas9K | AGCAGGTACCTCCAAC | 65 | E51SaCas9K | AAATGCCATCTTCCTT |
| | KH13 | ATCAAG | | KH39 | GATGTT |
| 39 | E51SaCas9K | AGCAGGTACCTCCAAC | 66 | E51SaCas9K | CCAAACTAGAAATGCC |
| | KH13 | ATCAAG | | KH40 | ATCTTC |
| 39 | E51SaCas9K | AGCAGGTACCTCCAAC | 67 | E51SaCas9K | AGGAAACTGCCATCTC |
| | KH13 | ATCAAG | | KH41 | CAAACT |
| 39 | E51SaCas9K | AGCAGGTACCTCCAAC | 68 | E51SaCas9K | CTGTTACTCTGGTGAC |
| | KH13 | ATCAAG | | KH42 | ACAACC |
| 39 | E51SaCas9K | AGCAGGTACCTCCAAC | 69 | E51SaCas9K | TAGCTCCTACTCAGAC |
| | KH13 | ATCAAG | | KH43 | TGTTAC |
| 40 | E51SaCas9K | CAACATCAAGGAAGAT | 41 | E51SaCas9K | AGGAAGATGGCATTTC |
| | KH14 | GGCATT | | KH15 | TAGTTT |
| 40 | E51SaCas9K | CAACATCAAGGAAGAT | 42 | E51SaCas9K | ATGGCATTTCTAGTTT |
| | KH14 | GGCATT | | KH16 | GGAGAT |
| 4C | E51SaCas9K | CAACATCAAGGAAGAT | 43 | E51SaCas9K | CTAGTTTGGAGATGGC |
| | KH14 | GGCATT | | KH17 | AGTTTC |
| 4C | E51SaCas9K | CAACATCAAGGAAGAT | 44 | E51SaCas9K | GATGGCAGTTTCCTTA |
| | KH14 | GGCATT | | KH18 | GTAACC |
| 40 | E51SaCas9K | CAACATCAAGGAAGAT | 45 | E51SaCas9K | TAGTAACCACAGGTTG |
| | KH14 | GGCATT | | KH19 | TGTCAC |
| 40 | E51SaCas9K | CAACATCAAGGAAGAT | 46 | E51SaCas9K | CCACAGGTTGTGTCAC |
| | KH14 | GGCATT | | KH20 | CAGAGT |
| 40 | E51SaCas9K | CAACATCAAGGAAGAT | 47 | E51SaCas9K | GTTGTGTCACCAGAGT |
| | KH14 | GGCATT | | KH21 | AACAGT |
| 4C | E51SaCas9K | CAACATCAAGGAAGAT | 48 | E51SaCas9K | GAGTAACAGTCTGAGT |
| | KH14 | GGCATT | | KH22 | AGGAGC |
| 40 | E51SaCas9K | CAACATCAAGGAAGAT | 53 | E51SaCas9K | TCAACGAGATGATCAT |
| | KH14 | GGCATT | | KH27 | CAAGCA |
| 40 | E51SaCas9K | CAACATCAAGGAAGAT | 54 | E51SaCas9K | GTGACCTTGAGGATAT |
| | KH14 | GGCATT | | KH28 | CAACGA |
| 4C | E51SaCas9K | CAACATCAAGGAAGAT | 55 | E51SaCas9K | TGGGTGACCTTGAGGA |
| | KH14 | GGCATT | | KH29 | TATCAA |
| 4C | E51SaCas9K | CAACATCAAGGAAGAT | 56 | E51SaCas9K | GAGGGTGATGGTGGGT |
| | KH14 | GGCATT | | KH30 | GACCTT |
| 40 | E51SaCas9K | CAACATCAAGGAAGAT | 57 | E51SaCas9K | TATAAAATCACAGAGG |
| | KH14 | GGCATT | | KH31 | GTGATG |
| 40 | E51SaCas9K | CAACATCAAGGAAGAT | 58 | E51SaCas9K | AAGTTATAAAATCACA |
| | KH14 | GGCATT | | KH32 | GAGGGT |
| 40 | E51SaCas9K | CAACATCAAGGAAGAT | 59 | E51SaCas9K | ATCAAGTTATAAAATC |
| | KH14 | GGCATT | | KH33 | ACAGAG |
| 4C | E51SaCas9K | CAACATCAAGGAAGAT | 60 | E51SaCas9K | TTGATCAAGTTATAAA |
| | KH14 | GGCATT | | KH34 | ATCACA |
| 40 | E51SaCas9K | CAACATCAAGGAAGAT | 61 | E51SaCas9K | CTTTCTCTGCTTGATC |
| | KH14 | GGCATT | | KH35 | AAGTTA |
| 40 | E51SaCas9K | CAACATCAAGGAAGAT | 62 | E51SaCas9K | CCGACTGGCTTTCTCT |
| | KH14 | GGCATT | | KH36 | GCTTGA |
| 40 | E51SaCas9K | CAACATCAAGGAAGAT | 63 | E51SaCas9K | ACTTACCGACTGGCTT |
| | KH14 | GGCATT | | KH37 | TCTCTG |
| 4C | E51SaCas9K | CAACATCAAGGAAGAT | 64 | E51SaCas9K | GATGTTGGAGGTACCT |
| | KH14 | GGCATT | | KH38 | GCTCTG |
| 40 | E51SaCas9K | CAACATCAAGGAAGAT | 65 | E51SaCas9K | AAATGCCATCTTCCTT |
| | KH14 | GGCATT | | KH39 | GATGTT |
| 40 | E51SaCas9K | CAACATCAAGGAAGAT | 66 | E51SaCas9K | CCAAACTAGAAATGCC |
| | KH14 | GGCATT | | KH40 | ATCTTC |
| 40 | E51SaCas9K | CAACATCAAGGAAGAT | 67 | E51SaCas9K | AGGAAACTGCCATCTC |
| | KH14 | GGCATT | | KH41 | CAAACT |
| 4C | E51SaCas9K | CAACATCAAGGAAGAT | 68 | E51SaCas9K | CTGTTACTCTGGTGAC |
| | KH14 | GGCATT | | KH42 | ACAACC |
| 40 | E51SaCas9K | CAACATCAAGGAAGAT | 69 | E51SaCas9K | TAGCTCCTACTCAGAC |
| | KH14 | GGCATT | | KH43 | TGTTAC |
| 41 | E51SaCas9K | AGGAAGATGGCATTTC | 42 | E51SaCas9K | ATGGCATTTCTAGTTT |
| | KH15 | TAGTTT | | KH16 | GGAGAT |
| 41 | E51SaCas9K | AGGAAGATGGCATTTC | 43 | E51SaCas9K | CTAGTTTGGAGATGGC |
| | KH15 | TAGTTT | | KH17 | AGTTTC |
| 41 | E51SaCas9K | AGGAAGATGGCATTTC | 44 | E51SaCas9K | GATGGCAGTTTCCTTA |
| | KH15 | TAGTTT | | KH18 | GTAACC |
| 41 | E51SaCas9K | AGGAAGATGGCATTTC | 45 | E51SaCas9K | TAGTAACCACAGGTTG |
| | KH15 | TAGTTT | | KH19 | TGTCAC |
| 41 | E51SaCas9K | AGGAAGATGGCATTTC | 46 | E51SaCas9K | CCACAGGTTGTGTCAC |
| | KH15 | TAGTTT | | KH20 | CAGAGT |
| 41 | E51SaCas9K | AGGAAGATGGCATTTC | 47 | E51SaCas9K | GTTGTGTCACCAGAGT |
| | KH15 | TAGTTT | | KH21 | AACAGT |
| 41 | E51SaCas9K | AGGAAGATGGCATTTC | 48 | E51SaCas9K | GAGTAACAGTCTGAGT |
| | KH15 | TAGTTT | | KH22 | AGGAGC |
| 41 | E51SaCas9K | AGGAAGATGGCATTTC | 5.3 | E51SaCas9K | TCAACGAGATGATCAT |
| | KH15 | TAGTTT | | KH27 | CAAGCA |
| 41 | E51SaCas9K | AGGAAGATGGCATTTC | 54 | E51SaCas9K | GTGACCTTGAGGATAT |
| | KH15 | TAGTTT | | KH28 | CAACGA |
| 41 | E51SaCas9K | AGGAAGATGGCATTTC | 55 | E51SaCas9K | TGGGTGACCTTGAGGA |
| | KH15 | TAGTTT | | KH29 | TATCAA |
| 41 | E51SaCas9K | AGGAAGATGGCATTTC | 56 | E51SaCas9K | GAGGGTGATGGTGGGT |
| | KH15 | TAGTTT | | KH30 | GACCTT |
| 41 | E51SaCas9K | AGGAAGATGGCATTTC | 57 | E51SaCas9K | TATAAAATCACAGAGG |
| | KH15 | TAGTTT | | KH31 | GTGATG |
| 41 | E51SaCas9K | AGGAAGATGGCATTTC | 58 | E51SaCas9K | AAGTTATAAAATCACA |
| | KH15 | TAGTTT | | KH32 | GAGGGT |
| 41 | E51SaCas9K | AGGAAGATGGCATTTC | 59 | E51SaCas9K | ATCAAGTTATAAAATC |
| | KH15 | TAGTTT | | KH33 | ACAGAG |
| 41 | E51SaCas9K | AGGAAGATGGCATTTC | 60 | E51SaCas9K | TTGATCAAGTTATAAA |
| | KH15 | TAGTTT | | KH34 | ATCACA |
| 41 | E51SaCas9K | AGGAAGATGGCATTTC | 61 | E51SaCas9K | CTTTCTCTGCTTGATC |
| | KH15 | TAGTTT | | KH35 | AAGTTA |
| 41 | E51SaCas9K | AGGAAGATGGCATTTC | 62 | E51SaCas9K | CCGACTGGCTTTCTCT |
| | KH15 | TAGTTT | | KH36 | GCTTGA |
| 41 | E51SaCas9K | AGGAAGATGGCATTTC | 63 | E51SaCas9K | ACTTACCGACTGGCTT |
| | KH15 | TAGTTT | | KH37 | TCTCTG |
| 41 | E51SaCas9K | AGGAAGATGGCATTTC | 64 | E51SaCas9K | GATGTTGGAGGTACCT |
| | KH15 | TAGTTT | | KH38 | GCTCTG |
| 41 | E51SaCas9K | AGGAAGATGGCATTTC | 65 | E51SaCas9K | AAATGCCATCTTCCTT |
| | KH15 | TAGTTT | | KH39 | GATGTT |
| 41 | E51SaCas9K | AGGAAGATGGCATTTC | 66 | E51SaCas9K | CCAAACTAGAAATGCC |
| | KH15 | TAGTTT | | KH40 | ATCTTC |
| 41 | E51SaCas9K | AGGAAGATGGCATTTC | 67 | E51SaCas9K | AGGAAACTGCCATCTC |
| | KH15 | TAGTTT | | KH41 | CAAACT |
| 41 | E51SaCas9K | AGGAAGATGGCATTTC | 68 | E51SaCas9K | CTGTTACTCTGGTGAC |
| | KH15 | TAGTTT | | KH42 | ACAACC |
| 41 | E51SaCas9K | AGGAAGATGGCATTTC | 69 | E51SaCas9K | TAGCTCCTACTCAGAC |
| | KH15 | TAGTTT | | KH43 | TGTTAC |
| 42 | E51SaCas9K | ATGGCATTTCTAGTTT | 43 | E51SaCas9K | CTAGTTTGGAGATGGC |
| | KH16 | GGAGAT | | KH17 | AGTTTC |
| 42 | E51SaCas9K | ATGGCATTTCTAGTTT | 44 | E51SaCas9K | GATGGCAGTTTCCTTA |
| | KH16 | GGAGAT | | KH18 | GTAACC |
| 42 | E51SaCas9K | ATGGCATTTCTAGTTT | 45 | E51SaCas9K | TAGTAACCACAGGTTG |
| | KH16 | GGAGAT | | KH19 | TGTCAC |
| 42 | E51SaCas9K | ATGGCATTTCTAGTTT | 46 | E51SaCas9K | CCACAGGTTGTGTCAC |
| | KH16 | GGAGAT | | KH20 | CAGAGT |
| 42 | E51SaCas9K | ATGGCATTTCTAGTTT | 47 | E51SaCas9K | GTTGTGTCACCAGAGT |
| | KH16 | GGAGAT | | KH21 | AACAGT |
| 42 | E51SaCas9K | ATGGCATTTCTAGTTT | 48 | E51SaCas9K | GAGTAACAGTCTGAGT |
| | KH16 | GGAGAT | | KH22 | AGGAGC |
| 42 | E51SaCas9K | ATGGCATTTCTAGTTT | 53 | E51SaCas9K | TCAACGAGATGATCAT |
| | KH16 | GGAGAT | | KH27 | CAAGCA |
| 42 | E51SaCas9K | ATGGCATTTCTAGTTT | 54 | E51SaCas9K | GTGACCTTGAGGATAT |
| | KH16 | GGAGAT | | KH28 | CAACGA |
| 42 | E51SaCas9K | ATGGCATTTCTAGTTT | 55 | E51SaCas9K | TGGGTGACCTTGAGGA |
| | KH16 | GGAGAT | | KH29 | TATCAA |
| 42 | E51SaCas9K | ATGGCATTTCTAGTTT | 56 | E51SaCas9K | GAGGGTGATGGTGGGT |
| | KH16 | GGAGAT | | KH30 | GACCTT |
| 42 | E51SaCas9K | ATGGCATTTCTAGTTT | 57 | E51SaCas9K | TATAAAATCACAGAGG |
| | KH16 | GGAGAT | | KH31 | GTGATG |
| 42 | E51SaCas9K | ATGGCATTTCTAGTTT | 58 | E51SaCas9K | AAGTTATAAAATCACA |
| | KH16 | GGAGAT | | KH32 | GAGGGT |
| 42 | E51SaCas9K | ATGGCATTTCTAGTTT | 59 | E51SaCas9K | ATCAAGTTATAAAATC |
| | KH16 | GGAGAT | | KH33 | ACAGAG |
| 42 | E51SaCas9K | ATGGCATTTCTAGTTT | 60 | E51SaCas9K | TTGATCAAGTTATAAA |
| | KH16 | GGAGAT | | KH34 | ATCACA |
| 42 | E51SaCas9K | ATGGCATTTCTAGTTT | 61 | E51SaCas9K | CTTTCTCTGCTTGATC |
| | KH16 | GGAGAT | | KH35 | AAGTTA |
| 42 | E51SaCas9K | ATGGCATTTCTAGTTT | 62 | E51SaCas9K | CCGACTGGCTTTCTCT |
| | KH16 | GGAGAT | | KH36 | GCTTGA |
| 42 | E51SaCas9K | ATGGCATTTCTAGTTT | 63 | E51SaCas9K | ACTTACCGACTGGCTT |
| | KH16 | GGAGAT | | KH37 | TCTCTG |
| 42 | E51SaCas9K | ATGGCATTTCTAGTTT | 64 | E51SaCas9K | GATGTTGGAGGTACCT |
| | KH16 | GGAGAT | | KH38 | GCTCTG |
| 42 | E51SaCas9K | ATGGCATTTCTAGTTT | 65 | E51SaCas9K | AAATGCCATCTTCCTT |
| | KH16 | GGAGAT | | KH39 | GATGTT |
| 42 | E51SaCas9K | ATGGCATTTCTAGTTT | 66 | E51SaCas9K | CCAAACTAGAAATGCC |
| | KH16 | GGAGAT | | KH40 | ATCTTC |
| 42 | E51SaCas9K | ATGGCATTTCTAGTTT | 67 | E51SaCas9K | AGGAAACTGCCATCTC |
| | KH16 | GGAGAT | | KH41 | CAAACT |
| 42 | E51SaCas9K | ATGGCATTTCTAGTTT | 68 | E51SaCas9K | CTGTTACTCTGGTGAC |
| | KH16 | GGAGAT | | KH42 | ACAACC |
| 42 | E51SaCas9K | ATGGCATTTCTAGTTT | 69 | E51SaCas9K | TAGCTCCTACTCAGAC |
| | KH16 | GGAGAT | | KH43 | TGTTAC |
| 43 | E51SaCas9K | CTAGTTTGGAGATGGC | 44 | E51SaCas9K | GATGGCAGTTTCCTTA |
| | KH17 | AGTTTC | | KH18 | GTAACC |
| 43 | E51SaCas9K | CTAGTTTGGAGATGGC | 45 | E51SaCas9K | TAGTAACCACAGGTTG |
| | KH17 | AGTTTC | | KH19 | TGTCAC |
| 43 | E51SaCas9K | CTAGTTTGGAGATGGC | 46 | E51SaCas9K | CCACAGGTTGTGTCAC |
| | KH17 | AGTTTC | | KH20 | CAGAGT |
| 43 | E51SaCas9K | CTAGTTTGGAGATGGC | 47 | E51SaCas9K | GTTGTGTCACCAGAGT |
| | KH17 | AGTTTC | | KH21 | AACAGT |
| 43 | E51SaCas9K | CTAGTTTGGAGATGGC | 48 | E51SaCas9K | GAGTAACAGTCTGAGT |
| | KH17 | AGTTTC | | KH22 | AGGAGC |
| 43 | E51SaCas9K | CTAGTTTGGAGATGGC | 53 | E51SaCas9K | TCAACGAGATGATCAT |
| | KH17 | AGTTTC | | KH27 | CAAGCA |
| 43 | E51SaCas9K | CTAGTTTGGAGATGGC | 54 | E51SaCas9K | GTGACCTTGAGGATAT |
| | KH17 | AGTTTC | | KH28 | CAACGA |
| 43 | E51SaCas9K | CTAGTTTGGAGATGGC | 55 | E51SaCas9K | TGGGTGACCTTGAGGA |
| | KH17 | AGTTTC | | KH29 | TATCAA |
| 43 | E51SaCas9K | CTAGTTTGGAGATGGC | 56 | E51SaCas9K | GAGGGTGATGGTGGGT |
| | KH17 | AGTTTC | | KH30 | GACCTT |
| 43 | E51SaCas9K | CTAGTTTGGAGATGGC | 57 | E51SaCas9K | TATAAAATCACAGAGG |
| | KH17 | AGTTTC | | KH31 | GTGATG |
| 43 | E51SaCas9K | CTAGTTTGGAGATGGC | 58 | E51SaCas9K | AAGTTATAAAATCACA |
| | KH17 | AGTTTC | | KH32 | GAGGGT |
| 43 | E51SaCas9K | CTAGTTTGGAGATGGC | 59 | E51SaCas9K | ATCAAGTTATAAAATC |
| | KH17 | AGTTTC | | KH33 | ACAGAG |
| 43 | E51SaCas9K | CTAGTTTGGAGATGGC | 60 | E51SaCas9K | TTGATCAAGTTATAAA |
| | KH17 | AGTTTC | | KH34 | ATCACA |
| 43 | E51SaCas9K | CTAGTTTGGAGATGGC | 61 | E51SaCas9K | CTTTCTCTGCTTGATC |
| | KH17 | AGTTTC | | KH35 | AAGTTA |
| 43 | E51SaCas9K | CTAGTTTGGAGATGGC | 62 | E51SaCas9K | CCGACTGGCTTTCTCT |
| | KH17 | AGTTTC | | KH36 | GCTTGA |
| 43 | E51SaCas9K | CTAGTTTGGAGATGGC | 63 | E51SaCas9K | ACTTACCGACTGGCTT |
| | KH17 | AGTTTC | | KH37 | TCTCTG |
| 43 | E51SaCas9K | CTAGTTTGGAGATGGC | 64 | E51SaCas9K | GATGTTGGAGGTACCT |
| | KH17 | AGTTTC | | KH38 | GCTCTG |
| 43 | E51SaCas9K | CTAGTTTGGAGATGGC | 65 | E51SaCas9K | AAATGCCATCTTCCTT |
| | KH17 | AGTTTC | | KH39 | GATGTT |
| 43 | E51SaCas9K | CTAGTTTGGAGATGGC | 66 | E51SaCas9K | CCAAACTAGAAATGCC |
| | KH17 | AGTTTC | | KH40 | ATCTTC |
| 43 | E51SaCas9K | CTAGTTTGGAGATGGC | 67 | E51SaCas9K | AGGAAACTGCCATCTC |
| | KH17 | AGTTTC | | KH41 | CAAACT |
| 43 | E51SaCas9K | CTAGTTTGGAGATGGC | | E51SaCas9K | CTGTTACTCTGGTGAC |
| | KH17 | AGTTTC | | KH42 | ACAACC |
| 43 | E51SaCas9K | CTAGTTTGGAGATGGC | 69 | E51SaCas9K | TAGCTCCTACTCAGAC |
| | KH17 | AGTTTC | | KH43 | TGTTAC |
| 44 | E51SaCas9K | GATGGCAGTTTCCTTA | 45 | E51SaCas9K | TAGTAACCACAGGTTG |
| | KH18 | GTAACC | | KH19 | TGTCAC |
| 44 | E51SaCas9K | GATGGCAGTTTCCTTA | 46 | E51SaCas9K | CCACAGGTTGTGTCAC |
| | KH18 | GTAACC | | KH20 | CAGAGT |
| 44 | E51SaCas9K | GATGGCAGTTTCCTTA | 47 | E51SaCas9K | GTTGTGTCACCAGAGT |
| | KH18 | GTAACC | | KH21 | AACAGT |
| 44 | E51SaCas9K | GATGGCAGTTTCCTTA | 48 | E51SaCas9K | GAGTAACAGTCTGAGT |
| | KH18 | GTAACC | | KH22 | AGGAGC |
| 44 | E51SaCas9K | GATGGCAGTTTCCTTA | 53 | E51SaCas9K | TCAACGAGATGATCAT |
| | KH18 | GTAACC | | KH27 | CAAGCA |
| 44 | E51SaCas9K | GATGGCAGTTTCCTTA | 54 | E51SaCas9K | GTGACCTTGAGGATAT |
| | KH18 | GTAACC | | KH28 | CAACGA |
| 44 | E51SaCas9K | GATGGCAGTTTCCTTA | 55 | E51SaCas9K | TGGGTGACCTTGAGGA |
| | KH18 | GTAACC | | KH29 | TATCAA |
| 44 | E51SaCas9K | GATGGCAGTTTCCTTA | 56 | E51SaCas9K | GAGGGTGATGGTGGGT |
| | KH18 | GTAACC | | KH30 | GACCTT |
| 44 | E51SaCas9K | GATGGCAGTTTCCTTA | 57 | E51SaCas9K | TATAAAATCACAGAGG |
| | KH18 | GTAACC | | KH31 | GTGATG |
| 44 | E51SaCas9K | GATGGCAGTTTCCTTA | 58 | E51SaCas9K | AAGTTATAAAATCACA |
| | KH18 | GTAACC | | KH32 | GAGGGT |
| 44 | E51SaCas9K | GATGGCAGTTTCCTTA | 59 | E51SaCas9K | ATCAAGTTATAAAATC |
| | KH18 | GTAACC | | KH33 | ACAGAG |
| 44 | E51SaCas9K | GATGGCAGTTTCCTTA | 60 | E51SaCas9K | TTGATCAAGTTATAAA |
| | KH18 | GTAACC | | KH34 | ATCACA |
| 44 | E51SaCas9K | GATGGCAGTTTCCTTA | 61 | E51SaCas9K | CTTTCTCTGCTTGATC |
| | KH18 | GTAACC | | KH35 | AAGTTA |
| 44 | E51SaCas9K | GATGGCAGTTTCCTTA | 62 | E51SaCas9K | CCGACTGGCTTTCTCT |
| | KH18 | GTAACC | | KH36 | GCTTGA |
| 44 | E51SaCas9K | GATGGCAGTTTCCTTA | 63 | E51SaCas9K | ACTTACCGACTGGCTT |
| | KH18 | GTAACC | | KH37 | TCTCTG |
| 44 | E51SaCas9K | GATGGCAGTTTCCTTA | 64 | E51SaCas9K | GATGTTGGAGGTACCT |
| | KH18 | GTAACC | | KH38 | GCTCTG |
| 44 | E51SaCas9K | GATGGCAGTTTCCTTA | 65 | E51SaCas9K | AAATGCCATCTTCCTT |
| | KH18 | GTAACC | | KH39 | GATGTT |
| 44 | E51SaCas9K | GATGGCAGTTTCCTTA | 66 | E51SaCas9K | CCAAACTAGAAATGCC |
| | KH18 | GTAACC | | KH40 | ATCTTC |
| 44 | E51SaCas9K | GATGGCAGTTTCCTTA | 67 | E51SaCas9K | AGGAAACTGCCATCTC |
| | KH18 | GTAACC | | KH41 | CAAACT |
| 44 | E51SaCas9K | GATGGCAGTTTCCTTA | 68 | E51SaCas9K | CTGTTACTCTGGTGAC |
| | KH18 | GTAACC | | KH42 | ACAACC |
| 44 | E51SaCas9K | GATGGCAGTTTCCTTA | 69 | E51SaCas9K | TAGCTCCTACTCAGAC |
| | KH18 | GTAACC | | KH43 | TGTTAC |
| 45 | E51SaCas9K | TAGTAACCACAGGTTG | 46 | E51SaCas9K | CCACAGGTTGTGTCAC |
| | KH19 | TGTCAC | | KH20 | CAGAGT |
| 45 | E51SaCas9K | TAGTAACCACAGGTTG | 47 | E51SaCas9K | GTTGTGTCACCAGAGT |
| | KH19 | TGTCAC | | KH21 | AACAGT |
| 45 | E51SaCas9K | TAGTAACCACAGGTTG | 48 | E51SaCas9K | GAGTAACAGTCTGAGT |
| | KH19 | TGTCAC | | KH22 | AGGAGC |
| 45 | E51SaCas9K | TAGTAACCACAGGTTG | 53 | E51SaCas9K | TCAACGAGATGATCAT |
| | KH19 | TGTCAC | | KH27 | CAAGCA |
| 45 | E51SaCas9K | TAGTAACCACAGGTTG | 54 | E51SaCas9K | GTGACCTTGAGGATAT |
| | KH19 | TGTCAC | | KH28 | CAACGA |
| 45 | E51SaCas9K | TAGTAACCACAGGTTG | 55 | E51SaCas9K | TGGGTGACCTTGAGGA |
| | KH19 | TGTCAC | | KH29 | TATCAA |
| 45 | E51SaCas9K | TAGTAACCACAGGTTG | 56 | E51SaCas9K | GAGGGTGATGGTGGGT |
| | KH19 | TGTCAC | | KH30 | GACCTT |
| 45 | E51SaCas9K | TAGTAACCACAGGTTG | 57 | E51SaCas9K | TATAAAATCACAGAGG |
| | KH19 | TGTCAC | | KH31 | GTGATG |
| 45 | E51SaCas9K | TAGTAACCACAGGTTG | 58 | E51SaCas9K | AAGTTATAAAATCACA |
| | KH19 | TGTCAC | | KH32 | GAGGGT |
| 45 | E51SaCas9K | TAGTAACCACAGGTTG | 59 | E51SaCas9K | ATCAAGTTATAAAATC |
| | KH19 | TGTCAC | | KH33 | ACAGAG |
| 45 | E51SaCas9K | TAGTAACCACAGGTTG | 60 | E51SaCas9K | TTGATCAAGTTATAAA |
| | KH19 | TGTCAC | | KH34 | ATCACA |
| 45 | E51SaCas9K | TAGTAACCACAGGTTG | 61 | E51SaCas9K | CTTTCTCTGCTTGATC |
| | KH19 | TGTCAC | | KH35 | AAGTTA |
| 45 | E51SaCas9K | TAGTAACCACAGGTTG | 62 | E51SaCas9K | CCGACTGGCTTTCTCT |
| | KH19 | TGTCAC | | KH36 | GCTTGA |
| 45 | E51SaCas9K | TAGTAACCACAGGTTG | 63 | E51SaCas9K | ACTTACCGACTGGCTT |
| | KH19 | TGTCAC | | KH37 | TCTCTG |
| 45 | E51SaCas9K | TAGTAACCACAGGTTG | 64 | E51SaCas9K | GATGTTGGAGGTACCT |
| | KH19 | TGTCAC | | KH38 | GCTCTG |
| 45 | E51SaCas9K | TAGTAACCACAGGTTG | 65 | E51SaCas9K | AAATGCCATCTTCCTT |
| | KH19 | TGTCAC | | KH39 | GATGTT |
| 45 | E51SaCas9K | TAGTAACCACAGGTTG | 66 | E51SaCas9K | CCAAACTAGAAATGCC |
| | KH19 | TGTCAC | | KH40 | ATCTTC |
| 45 | E51SaCas9K | TAGTAACCACAGGTTG | 67 | E51SaCas9K | AGGAAACTGCCATCTC |
| | KH19 | TGTCAC | | KH41 | CAAACT |
| 45 | E51SaCas9K | TAGTAACCACAGGTTG | 68 | E51SaCas9K | CTGTTACTCTGGTGAC |
| | KH19 | TGTCAC | | KH42 | ACAACC |
| 45 | E51SaCas9K | TAGTAACCACAGGTTG | 69 | E51SaCas9K | TAGCTCCTACTCAGAC |
| | KH19 | TGTCAC | | KH43 | TGTTAC |
| 46 | E51SaCas9K | CCACAGGTTGTGTCAC | 47 | E51SaCas9K | GTTGTGTCACCAGAGT |
| | KH20 | CAGAGT | | KH21 | AACAGT |
| 46 | E51SaCas9K | CCACAGGTTGTGTCAC | 48 | E51SaCas9K | GAGTAACAGTCTGAGT |
| | KH20 | CAGAGT | | KH22 | AGGAGC |
| 46 | E51SaCas9K | CCACAGGTTGTGTCAC | 53 | E51SaCas9K | TCAACGAGATGATCAT |
| | KH20 | CAGAGT | | KH27 | CAAGCA |
| 46 | E51SaCas9K | CCACAGGTTGTGTCAC | 54 | E51SaCas9K | GTGACCTTGAGGATAT |
| | KH20 | CAGAGT | | KH28 | CAACGA |
| 46 | E51SaCas9K | CCACAGGTTGTGTCAC | 55 | E51SaCas9K | TGGGTGACCTTGAGGA |
| | KH20 | CAGAGT | | KH29 | TATCAA |
| 46 | E51SaCas9K | CCACAGGTTGTGTCAC | 56 | E51SaCas9K | GAGGGTGATGGTGGGT |
| | KH20 | CAGAGT | | KH30 | GACCTT |
| 46 | E51SaCas9K | CCACAGGTTGTGTCAC | 57 | E51SaCas9K | TATAAAATCACAGAGG |
| | KH20 | CAGAGT | | KH31 | GTGATG |
| 46 | E51SaCas9K | CCACAGGTTGTGTCAC | 58 | E51SaCas9K | AAGTTATAAAATCACA |
| | KH20 | CAGAGT | | KH32 | GAGGGT |
| 46 | E51SaCas9K | CCACAGGTTGTGTCAC | 59 | E51SaCas9K | ATCAAGTTATAAAATC |
| | KH20 | CAGAGT | | KH33 | ACAGAG |
| 46 | E51SaCas9K | CCACAGGTTGTGTCAC | 60 | E51SaCas9K | TTGATCAAGTTATAAA |
| | KH20 | CAGAGT | | KH34 | ATCACA |
| 46 | E51SaCas9K | CCACAGGTTGTGTCAC | 61 | E51SaCas9K | CTTTCTCTGCTTGATC |
| | KH20 | CAGAGT | | KH35 | AAGTTA |
| 46 | E51SaCas9K | CCACAGGTTGTGTCAC | 62 | E51SaCas9K | CCGACTGGCTTTCTCT |
| | KH20 | CAGAGT | | KH36 | GCTTGA |
| 46 | E51SaCas9K | CCACAGGTTGTGTCAC | 63 | E51SaCas9K | ACTTACCGACTGGCTT |
| | KH20 | CAGAGT | | KH37 | TCTCTG |
| 46 | E51SaCas9K | CCACAGGTTGTGTCAC | 64 | E51SaCas9K | GATGTTGGAGGTACCT |
| | KH20 | CAGAGT | | KH38 | GCTCTG |
| 46 | E51SaCas9K | CCACAGGTTGTGTCAC | 65 | E51SaCas9K | AAATGCCATCTTCCTT |
| | KH20 | CAGAGT | | KH39 | GATGTT |
| 46 | E51SaCas9K | CCACAGGTTGTGTCAC | 66 | E51SaCas9K | CCAAACTAGAAATGCC |
| | KH20 | CAGAGT | | KH40 | ATCTTC |
| 46 | E51SaCas9K | CCACAGGTTGTGTCAC | 67 | E51SaCas9K | AGGAAACTGCCATCTC |
| | KH20 | CAGAGT | | KH41 | CAAACT |
| 46 | E51SaCas9K | CCACAGGTTGTGTCAC | 68 | E51SaCas9K | CTGTTACTCTGGTGAC |
| | KH20 | CAGAGT | | KH42 | ACAACC |
| 46 | E51SaCas9K | CCACAGGTTGTGTCAC | 69 | E51SaCas9K | TAGCTCCTACTCAGAC |
| | KH20 | CAGAGT | | KH43 | TGTTAC |
| 47 | E51SaCas9K | GTTGTGTCACCAGAGT | 48 | E51SaCas9K | GAGTAACAGTCTGAGT |
| | KH21 | AACAGT | | KH22 | AGGAGC |
| 47 | E51SaCas9K | GTTGTGTCACCAGAGT | 53 | E51SaCas9K | TCAACGAGATGATCAT |
| | KH21 | AACAGT | | KH27 | CAAGCA |
| 47 | E51SaCas9K | GTTGTGTCACCAGAGT | 54 | E51SaCas9K | GTGACCTTGAGGATAT |
| | KH21 | AACAGT | | KH28 | CAACGA |
| 47 | E51SaCas9K | GTTGTGTCACCAGAGT | 55 | E51SaCas9K | TGGGTGACCTTGAGGA |
| | KH21 | AACAGT | | KH29 | TATCAA |
| 47 | E51SaCas9K | GTTGTGTCACCAGAGT | 56 | E51SaCas9K | GAGGGTGATGGTGGGT |
| | KH21 | AACAGT | | KH30 | GACCTT |
| 47 | E51SaCas9K | GTTGTGTCACCAGAGT | 57 | E51SaCas9K | TATAAAATCACAGAGG |
| | KH21 | AACAGT | | KH31 | GTGATG |
| 47 | E51SaCas9K | GTTGTGTCACCAGAGT | 58 | E51SaCas9K | AAGTTATAAAATCACA |
| | KH21 | AACAGT | | KH32 | GAGGGT |
| 47 | E51SaCas9K | GTTGTGTCACCAGAGT | 59 | E51SaCas9K | ATCAAGTTATAAAATC |
| | KH21 | AACAGT | | KH33 | ACAGAG |
| 47 | E51SaCas9K | GTTGTGTCACCAGAGT | 60 | E51SaCas9K | TTGATCAAGTTATAAA |
| | KH21 | AACAGT | | KH34 | ATCACA |
| 47 | E51SaCas9K | GTTGTGTCACCAGAGT | 61 | E51SaCas9K | CTTTCTCTGCTTGATC |
| | KH21 | AACAGT | | KH35 | AAGTTA |
| 47 | E51SaCas9K | GTTGTGTCACCAGAGT | 62 | E51SaCas9K | CCGACTGGCTTTCTCT |
| | KH21 | AACAGT | | KH36 | GCTTGA |
| 47 | E51SaCas9K | GTTGTGTCACCAGAGT | 63 | E51SaCas9K | ACTTACCGACTGGCTT |
| | KH21 | AACAGT | | KH37 | TCTCTG |
| 47 | E51SaCas9K | GTTGTGTCACCAGAGT | 64 | E51SaCas9K | GATGTTGGAGGTACCT |
| | KH21 | AACAGT | | KH38 | GCTCTG |
| 47 | E51SaCas9K | GTTGTGTCACCAGAGT | 65 | E51SaCas9K | AAATGCCATCTTCCTT |
| | KH21 | AACAGT | | KH39 | GATGTT |
| 47 | E51SaCas9K | GTTGTGTCACCAGAGT | 66 | E51SaCas9K | CCAAACTAGAAATGCC |
| | KH21 | AACAGT | | KH40 | ATCTTC |
| 47 | E51SaCas9K | GTTGTGTCACCAGAGT | 67 | E51SaCas9K | AGGAAACTGCCATCTC |
| | KH21 | AACAGT | | KH41 | CAAACT |
| 47 | E51SaCas9K | GTTGTGTCACCAGAGT | 68 | E51SaCas9K | CTGTTACTCTGGTGAC |
| | KH21 | AACAGT | | KH42 | ACAACC |
| 47 | E51SaCas9K | GTTGTGTCACCAGAGT | 69 | E51SaCas9K | TAGCTCCTACTCAGAC |
| | KH21 | AACAGT | | KH43 | TGTTAC |
| 48 | E51SaCas9K | GAGTAACAGTCTGAGT | 53 | E51SaCas9K | TCAACGAGATGATCAT |
| | KH22 | AGGAGC | | KH27 | CAAGCA |
| 48 | E51SaCas9K | GAGTAACAGTCTGAGT | 54 | E51SaCas9K | GTGACCTTGAGGATAT |
| | KH22 | AGGAGC | | KH28 | CAACGA |
| 48 | E51SaCas9K | GAGTAACAGTCTGAGT | 55 | E51SaCas9K | TGGGTGACCTTGAGGA |
| | KH22 | AGGAGC | | KH29 | TATCAA |
| 48 | E51SaCas9K | GAGTAACAGTCTGAGT | 56 | E51SaCas9K | GAGGGTGATGGTGGGT |
| | KH22 | AGGAGC | | KH30 | GACCTT |
| 48 | E51SaCas9K | GAGTAACAGTCTGAGT | 57 | E51SaCas9K | TATAAAATCACAGAGG |
| | KH22 | AGGAGC | | KH31 | GTGATG |
| 48 | E51SaCas9K | GAGTAACAGTCTGAGT | 58 | E51SaCas9K | AAGTTATAAAATCACA |
| | KH22 | AGGAGC | | KH32 | GAGGGT |
| 48 | E51SaCas9K | GAGTAACAGTCTGAGT | 59 | E51SaCas9K | ATCAAGTTATAAAATC |
| | KH22 | AGGAGC | | KH33 | ACAGAG |
| 48 | E51SaCas9K | GAGTAACAGTCTGAGT | 60 | E51SaCas9K | TTGATCAAGTTATAAA |
| | KH22 | AGGAGC | | KH34 | ATCACA |
| 48 | E51SaCas9K | GAGTAACAGTCTGAGT | 61 | E51SaCas9K | CTTTCTCTGCTTGATC |
| | KH22 | AGGAGC | | KH35 | AAGTTA |
| 48 | E51SaCas9K | GAGTAACAGTCTGAGT | 62 | E51SaCas9K | CCGACTGGCTTTCTCT |
| | KH22 | AGGAGC | | KH36 | GCTTGA |
| 48 | E51SaCas9K | GAGTAACAGTCTGAGT | 63 | E51SaCas9K | ACTTACCGACTGGCTT |
| | KH22 | AGGAGC | | KH37 | TCTCTG |
| 48 | E51SaCas9K | GAGTAACAGTCTGAGT | 64 | E51SaCas9K | GATGTTGGAGGTACCT |
| | KH22 | AGGAGC | | KH38 | GCTCTG |
| 48 | E51SaCas9K | GAGTAACAGTCTGAGT | 65 | E51SaCas9K | AAATGCCATCTTCCTT |
| | KH22 | AGGAGC | | KH39 | GATGTT |
| 48 | E51SaCas9K | GAGTAACAGTCTGAGT | 66 | E51SaCas9K | CCAAACTAGAAATGCC |
| | KH22 | AGGAGC | | KH40 | ATCTTC |
| 48 | E51SaCas9K | GAGTAACAGTCTGAGT | 67 | E51SaCas9K | AGGAAACTGCCATCTC |
| | KH22 | AGGAGC | | KH41 | CAAACT |
| 48 | E51SaCas9K | GAGTAACAGTCTGAGT | 68 | E51SaCas9K | CTGTTACTCTGGTGAC |
| | KH22 | AGGAGC | | KH42 | ACAACC |
| 48 | E51SaCas9K | GAGTAACAGTCTGAGT | 69 | E51SaCas9K | TAGCTCCTACTCAGAC |
| | KH22 | AGGAGC | | KH43 | TGTTAC |
| 53 | E51SaCas9K | TCAACGAGATGATCAT | 54 | E51SaCas9K | GTGACCTTGAGGATAT |
| | KH27 | CAAGCA | | KH28 | CAACGA |
| 53 | E51SaCas9K | TCAACGAGATGATCAT | 55 | E51SaCas9K | TGGGTGACCTTGAGGA |
| | KH27 | CAAGCA | | KH29 | TATCAA |
| 53 | E51SaCas9K | TCAACGAGATGATCAT | 56 | E51SaCas9K | GAGGGTGATGGTGGGT |
| | KH27 | CAAGCA | | KH30 | GACCTT |
| 53 | E51SaCas9K | TCAACGAGATGATCAT | 57 | E51SaCas9K | TATAAAATCACAGAGG |
| | KH27 | CAAGCA | | KH31 | GTGATG |
| 53 | E51SaCas9K | TCAACGAGATGATCAT | 58 | E51SaCas9K | AAGTTATAAAATCACA |
| | KH27 | CAAGCA | | KH32 | GAGGGT |
| 53 | E51SaCas9K | TCAACGAGATGATCAT | 59 | E51SaCas9K | ATCAAGTTATAAAATC |
| | KH27 | CAAGCA | | KH33 | ACAGAG |
| 53 | E51SaCas9K | TCAACGAGATGATCAT | 60 | E51SaCas9K | TTGATCAAGTTATAAA |
| | KH27 | CAAGCA | | KH34 | ATCACA |
| 53 | E51SaCas9K | TCAACGAGATGATCAT | 61 | E51SaCas9K | CTTTCTCTGCTTGATC |
| | KH27 | CAAGCA | | KH35 | AAGTTA |
| 53 | E51SaCas9K | TCAACGAGATGATCAT | 62 | E51SaCas9K | CCGACTGGCTTTCTCT |
| | KH27 | CAAGCA | | KH36 | GCTTGA |
| 53 | E51SaCas9K | TCAACGAGATGATCAT | 63 | E51SaCas9K | ACTTACCGACTGGCTT |
| | KH27 | CAAGCA | | KH37 | TCTCTG |
| 53 | E51SaCas9K | TCAACGAGATGATCAT | 64 | E51SaCas9K | GATGTTGGAGGTACCT |
| | KH27 | CAAGCA | | KH38 | GCTCTG |
| 53 | E51SaCas9K | TCAACGAGATGATCAT | 65 | E51SaCas9K | AAATGCCATCTTCCTT |
| | KH27 | CAAGCA | | KH39 | GATGTT |
| 53 | E51SaCas9K | TCAACGAGATGATCAT | 66 | E51SaCas9K | CCAAACTAGAAATGCC |
| | KH27 | CAAGCA | | KH40 | ATCTTC |
| 53 | E51SaCas9K | TCAACGAGATGATCAT | 67 | E51SaCas9K | AGGAAACTGCCATCTC |
| | KH27 | CAAGCA | | KH41 | CAAACT |
| 53 | E51SaCas9K | TCAACGAGATGATCAT | 68 | E51SaCas9K | CTGTTACTCTGGTGAC |
| | KH27 | CAAGCA | | KH42 | ACAACC |
| 53 | E51SaCas9K | TCAACGAGATGATCAT | 69 | E51SaCas9K | TAGCTCCTACTCAGAC |
| | KH27 | CAAGCA | | KH43 | TGTTAC |
| 54 | E51SaCas9K | GTGACCTTGAGGATAT | 55 | E51SaCas9K | TGGGTGACCTTGAGGA |
| | KH28 | CAACGA | | KH29 | TATCAA |
| 54 | E51SaCas9K | GTGACCTTGAGGATAT | 56 | E51SaCas9K | GAGGGTGATGGTGGGT |
| | KH28 | CAACGA | | KH30 | GACCTT |
| 54 | E51SaCas9K | GTGACCTTGAGGATAT | 57 | E51SaCas9K | TATAAAATCACAGAGG |
| | KH28 | CAACGA | | KH31 | GTGATG |
| 54 | E51SaCas9K | GTGACCTTGAGGATAT | 58 | E51SaCas9K | AAGTTATAAAATCACA |
| | KH28 | CAACGA | | KH32 | GAGGGT |
| 54 | E51SaCas9K | GTGACCTTGAGGATAT | 59 | E51SaCas9K | ATCAAGTTATAAAATC |
| | KH28 | CAACGA | | KH33 | ACAGAG |
| 54 | E51SaCas9K | GTGACCTTGAGGATAT | 60 | E51SaCas9K | TTGATCAAGTTATAAA |
| | KH28 | CAACGA | | KH34 | ATCACA |
| 54 | E51SaCas9K | GTGACCTTGAGGATAT | 61 | E51SaCas9K | CTTTCTCTGCTTGATC |
| | KH28 | CAACGA | | KH35 | AAGTTA |
| 54 | E51SaCas9K | GTGACCTTGAGGATAT | 62 | E51SaCas9K | CCGACTGGCTTTCTCT |
| | KH28 | CAACGA | | KH36 | GCTTGA |
| 54 | E51SaCas9K | GTGACCTTGAGGATAT | 63 | E51SaCas9K | ACTTACCGACTGGCTT |
| | KH28 | CAACGA | | KH37 | TCTCTG |
| 54 | E51SaCas9K | GTGACCTTGAGGATAT | 64 | E51SaCas9K | GATGTTGGAGGTACCT |
| | KH28 | CAACGA | | KH38 | GCTCTG |
| 54 | E51SaCas9K | GTGACCTTGAGGATAT | 65 | E51SaCas9K | AAATGCCATCTTCCTT |
| | KH28 | CAACGA | | KH39 | GATGTT |
| 54 | E51SaCas9K | GTGACCTTGAGGATAT | 66 | E51SaCas9K | CCAAACTAGAAATGCC |
| | KH28 | CAACGA | | KH40 | ATCTTC |
| 54 | E51SaCas9K | GTGACCTTGAGGATAT | 67 | E51SaCas9K | AGGAAACTGCCATCTC |
| | KH28 | CAACGA | | KH41 | CAAACT |
| 54 | E51SaCas9K | GTGACCTTGAGGATAT | 68 | E51SaCas9K | CTGTTACTCTGGTGAC |
| | KH28 | CAACGA | | KH42 | ACAACC |
| 54 | E51SaCas9K | GTGACCTTGAGGATAT | 69 | E51SaCas9K | TAGCTCCTACTCAGAC |
| | KH28 | CAACGA | | KH43 | TGTTAC |
| 55 | E51SaCas9K | TGGGTGACCTTGAGGA | 56 | E51SaCas9K | GAGGGTGATGGTGGGT |
| | KH29 | TATCAA | | KH30 | GACCTT |
| 55 | E51SaCas9K | TGGGTGACCTTGAGGA | 57 | E51SaCas9K | TATAAAATCACAGAGG |
| | KH29 | TATCAA | | KH31 | GTGATG |
| 55 | E51SaCas9K | TGGGTGACCTTGAGGA | 58 | E51SaCas9K | AAGTTATAAAATCACA |
| | KH29 | TATCAA | | KH32 | GAGGGT |
| 55 | E51SaCas9K | TGGGTGACCTTGAGGA | 59 | E51SaCas9K | ATCAAGTTATAAAATC |
| | KH29 | TATCAA | | KH33 | ACAGAG |
| 55 | E51SaCas9K | TGGGTGACCTTGAGGA | 60 | E51SaCas9K | TTGATCAAGTTATAAA |
| | KH29 | TATCAA | | KH34 | ATCACA |
| 55 | E51SaCas9K | TGGGTGACCTTGAGGA | 61 | E51SaCas9K | CTTTCTCTGCTTGATC |
| | KH29 | TATCAA | | KH35 | AAGTTA |
| 55 | E51SaCas9K | TGGGTGACCTTGAGGA | 62 | E51SaCas9K | CCGACTGGCTTTCTCT |
| | KH29 | TATCAA | | KH36 | GCTTGA |
| 55 | E51SaCas9K | TGGGTGACCTTGAGGA | 63 | E51SaCas9K | ACTTACCGACTGGCTT |
| | KH29 | TATCAA | | KH37 | TCTCTG |
| 55 | E51SaCas9K | TGGGTGACCTTGAGGA | 64 | E51SaCas9K | GATGTTGGAGGTACCT |
| | KH29 | TATCAA | | KH38 | GCTCTG |
| 55 | E51SaCas9K | TGGGTGACCTTGAGGA | 65 | E51SaCas9K | AAATGCCATCTTCCTT |
| | KH29 | TATCAA | | KH39 | GATGTT |
| 55 | E51SaCas9K | TGGGTGACCTTGAGGA | 66 | E51SaCas9K | CCAAACTAGAAATGCC |
| | KH29 | TATCAA | | KH40 | ATCTTC |
| 55 | E51SaCas9K | TGGGTGACCTTGAGGA | 67 | E51SaCas9K | AGGAAACTGCCATCTC |
| | KH29 | TATCAA | | KH41 | CAAACT |
| 55 | E51SaCas9K | TGGGTGACCTTGAGGA | 68 | E51SaCas9K | CTGTTACTCTGGTGAC |
| | KH29 | TATCAA | | KH42 | ACAACC |
| 55 | E51SaCas9K | TGGGTGACCTTGAGGA | 69 | E51SaCas9K | TAGCTCCTACTCAGAC |
| | KH29 | TATCAA | | KH43 | TGTTAC |
| 56 | E51SaCas9K | GAGGGTGATGGTGGGT | 57 | E51SaCas9K | TATAAAATCACAGAGG |
| | KH30 | GACCTT | | KH31 | GTGATG |
| 56 | E51SaCas9K | GAGGGTGATGGTGGGT | 58 | E51SaCas9K | AAGTTATAAAATCACA |
| | KH30 | GACCTT | | KH32 | GAGGGT |
| 56 | E51SaCas9K | GAGGGTGATGGTGGGT | 59 | E51SaCas9K | ATCAAGTTATAAAATC |
| | KH30 | GACCTT | | KH33 | ACAGAG |
| 56 | E51SaCas9K | GAGGGTGATGGTGGGT | 60 | E51SaCas9K | TTGATCAAGTTATAAA |
| | KH30 | GACCTT | | KH34 | ATCACA |
| 56 | E51SaCas9K | GAGGGTGATGGTGGGT | 61 | E51SaCas9K | CTTTCTCTGCTTGATC |
| | KH30 | GACCTT | | KH35 | AAGTTA |
| 56 | E51SaCas9K | GAGGGTGATGGTGGGT | 62 | E51SaCas9K | CCGACTGGCTTTCTCT |
| | KH30 | GACCTT | | KH36 | GCTTGA |
| 56 | E51SaCas9K | GAGGGTGATGGTGGGT | 63 | E51SaCas9K | ACTTACCGACTGGCTT |
| | KH30 | GACCTT | | KH37 | TCTCTG |
| 56 | E51SaCas9K | GAGGGTGATGGTGGGT | 64 | E51SaCas9K | GATGTTGGAGGTACCT |
| | KH30 | GACCTT | | KH38 | GCTCTG |
| 56 | E51SaCas9K | GAGGGTGATGGTGGGT | 65 | E51SaCas9K | AAATGCCATCTTCCTT |
| | KH30 | GACCTT | | KH39 | GATGTT |
| 56 | E51SaCas9K | GAGGGTGATGGTGGGT | 66 | E51SaCas9K | CCAAACTAGAAATGCC |
| | KH30 | GACCTT | | KH40 | ATCTTC |
| 56 | E51SaCas9K | GAGGGTGATGGTGGGT | 67 | E51SaCas9K | AGGAAACTGCCATCTC |
| | KH30 | GACCTT | | KH41 | CAAACT |
| 56 | E51SaCas9K | GAGGGTGATGGTGGGT | 68 | E51SaCas9K | CTGTTACTCTGGTGAC |
| | KH30 | GACCTT | | KH42 | ACAACC |
| 56 | E51SaCas9K | GAGGGTGATGGTGGGT | 69 | E51SaCas9K | TAGCTCCTACTCAGAC |
| | KH30 | GACCTT | | KH43 | TGTTAC |
| 57 | E51SaCas9K | TATAAAATCACAGAGG | 58 | E51SaCas9K | AAGTTATAAAATCACA |
| | KH31 | GTGATG | | KH32 | GAGGGT |
| 57 | E51SaCas9K | TATAAAATCACAGAGG | 59 | E51SaCas9K | ATCAAGTTATAAAATC |
| | KH31 | GTGATG | | KH33 | ACAGAG |
| 57 | E51SaCas9K | TATAAAATCACAGAGG | 60 | E51SaCas9K | TTGATCAAGTTATAAA |
| | KH31 | GTGATG | | KH34 | ATCACA |
| 57 | E51SaCas9K | TATAAAATCACAGAGG | 61 | E51SaCas9K | CTTTCTCTGCTTGATC |
| | KH31 | GTGATG | | KH35 | AAGTTA |
| 57 | E51SaCas9K | TATAAAATCACAGAGG | 62 | E51SaCas9K | CCGACTGGCTTTCTCT |
| | KH31 | GTGATG | | KH36 | GCTTGA |
| 57 | E51SaCas9K | TATAAAATCACAGAGG | 63 | E51SaCas9K | ACTTACCGACTGGCTT |
| | KH31 | GTGATG | | KH37 | TCTCTG |
| 57 | E51SaCas9K | TATAAAATCACAGAGG | 64 | E51SaCas9K | GATGTTGGAGGTACCT |
| | KH31 | GTGATG | | KH38 | GCTCTG |
| 57 | E51SaCas9K | TATAAAATCACAGAGG | 65 | E51SaCas9K | AAATGCCATCTTCCTT |
| | KH31 | GTGATG | | KH39 | GATGTT |
| 57 | E51SaCas9K | TATAAAATCACAGAGG | 66 | E51SaCas9K | CCAAACTAGAAATGCC |
| | KH31 | GTGATG | | KH40 | ATCTTC |
| 57 | E51SaCas9K | TATAAAATCACAGAGG | 67 | E51SaCas9K | AGGAAACTGCCATCTC |
| | KH31 | GTGATG | | KH41 | CAAACT |
| 57 | E51SaCas9K | TATAAAATCACAGAGG | | E51SaCas9K | CTGTTACTCTGGTGAC |
| | KH31 | GTGATG | | KH42 | ACAACC |
| 57 | E51SaCas9K | TATAAAATCACAGAGG | 69 | E51SaCas9K | TAGCTCCTACTCAGAC |
| | KH31 | GTGATG | | KH43 | TGTTAC |
| 58 | E51SaCas9K | AAGTTATAAAATCACA | 59 | E51SaCas9K | ATCAAGTTATAAAATC |
| | KH32 | GAGGGT | | KH33 | ACAGAG |
| 58 | E51SaCas9K | AAGTTATAAAATCACA | 60 | E51SaCas9K | TTGATCAAGTTATAAA |
| | KH32 | GAGGGT | | KH34 | ATCACA |
| 58 | E51SaCas9K | AAGTTATAAAATCACA | 61 | E51SaCas9K | CTTTCTCTGCTTGATC |
| | KH32 | GAGGGT | | KH35 | AAGTTA |
| 58 | E51SaCas9K | AAGTTATAAAATCACA | 62 | E51SaCas9K | CCGACTGGCTTTCTCT |
| | KH32 | GAGGGT | | KH36 | GCTTGA |
| 58 | E51SaCas9K | AAGTTATAAAATCACA | 63 | E51SaCas9K | ACTTACCGACTGGCTT |
| | KH32 | GAGGGT | | KH37 | TCTCTG |
| 58 | E51SaCas9K | AAGTTATAAAATCACA | 64 | E51SaCas9K | GATGTTGGAGGTACCT |
| | KH32 | GAGGGT | | KH38 | GCTCTG |
| 58 | E51SaCas9K | AAGTTATAAAATCACA | 65 | E51SaCas9K | AAATGCCATCTTCCTT |
| | KH32 | GAGGGT | | KH39 | GATGTT |
| 58 | E51SaCas9K | AAGTTATAAAATCACA | 66 | E51SaCas9K | CCAAACTAGAAATGCC |
| | KH32 | GAGGGT | | KH40 | ATCTTC |
| 58 | E51SaCas9K | AAGTTATAAAATCACA | 67 | E51SaCas9K | AGGAAACTGCCATCTC |
| | KH32 | GAGGGT | | KH41 | CAAACT |
| 58 | E51SaCas9K | AAGTTATAAAATCACA | 68 | E51SaCas9K | CTGTTACTCTGGTGAC |
| | KH32 | GAGGGT | | KH42 | ACAACC |
| 58 | E51SaCas9K | AAGTTATAAAATCACA | 69 | E51SaCas9K | TAGCTCCTACTCAGAC |
| | KH32 | GAGGGT | | KH43 | TGTTAC |
| 59 | E51SaCas9K | ATCAAGTTATAAAATC | 60 | E51SaCas9K | TTGATCAAGTTATAAA |
| | KH33 | ACAGAG | | KH34 | ATCACA |
| 59 | E51SaCas9K | ATCAAGTTATAAAATC | 61 | E51SaCas9K | CTTTCTCTGCTTGATC |
| | KH33 | ACAGAG | | KH35 | AAGTTA |
| 59 | E51SaCas9K | ATCAAGTTATAAAATC | 62 | E51SaCas9K | CCGACTGGCTTTCTCT |
| | KH33 | ACAGAG | | KH36 | GCTTGA |
| 59 | E51SaCas9K | ATCAAGTTATAAAATC | 63 | E51SaCas9K | ACTTACCGACTGGCTT |
| | KH33 | ACAGAG | | KH37 | TCTCTG |
| 59 | E51SaCas9K | ATCAAGTTATAAAATC | 64 | E51SaCas9K | GATGTTGGAGGTACCT |
| | KH33 | ACAGAG | | KH38 | GCTCTG |
| 59 | E51SaCas9K | ATCAAGTTATAAAATC | 65 | E51SaCas9K | AAATGCCATCTTCCTT |
| | KH33 | ACAGAG | | KH39 | GATGTT |
| 59 | E51SaCas9K | ATCAAGTTATAAAATC | 66 | E51SaCas9K | CCAAACTAGAAATGCC |
| | KH33 | ACAGAG | | KH40 | ATCTTC |
| 59 | E51SaCas9K | ATCAAGTTATAAAATC | 67 | E51SaCas9K | AGGAAACTGCCATCTC |
| | KH33 | ACAGAG | | KH41 | CAAACT |
| 59 | E51SaCas9K | ATCAAGTTATAAAATC | 68 | E51SaCas9K | CTGTTACTCTGGTGAC |
| | KH33 | ACAGAG | | KH42 | ACAACC |
| 59 | E51SaCas9K | ATCAAGTTATAAAATC | 69 | E51SaCas9K | TAGCTCCTACTCAGAC |
| | KH33 | ACAGAG | | KH43 | TGTTAC |
| 60 | E51SaCas9K | TTGATCAAGTTATAAA | 61 | E51SaCas9K | CTTTCTCTGCTTGATC |
| | KH34 | ATCACA | | KH35 | AAGTTA |
| 60 | E51SaCas9K | TTGATCAAGTTATAAA | 62 | E51SaCas9K | CCGACTGGCTTTCTCT |
| | KH34 | ATCACA | | KH36 | GCTTGA |
| 60 | E51SaCas9K | TTGATCAAGTTATAAA | 63 | E51SaCas9K | ACTTACCGACTGGCTT |
| | KH34 | ATCACA | | KH37 | TCTCTG |
| 60 | E51SaCas9K | TTGATCAAGTTATAAA | 64 | E51SaCas9K | GATGTTGGAGGTACCT |
| | KH34 | ATCACA | | KH38 | GCTCTG |
| 60 | E51SaCas9K | TTGATCAAGTTATAAA | 65 | E51SaCas9K | AAATGCCATCTTCCTT |
| | KH34 | ATCACA | | KH39 | GATGTT |
| 60 | E51SaCas9K | TTGATCAAGTTATAAA | 66 | E51SaCas9K | CCAAACTAGAAATGCC |
| | KH34 | ATCACA | | KH40 | ATCTTC |
| 60 | E51SaCas9K | TTGATCAAGTTATAAA | 67 | E51SaCas9K | AGGAAACTGCCATCTC |
| | KH34 | ATCACA | | KH41 | CAAACT |
| 60 | E51SaCas9K | TTGATCAAGTTATAAA | 68 | E51SaCas9K | CTGTTACTCTGGTGAC |
| | KH34 | ATCACA | | KH42 | ACAACC |
| 60 | E51SaCas9K | TTGATCAAGTTATAAA | 69 | E51SaCas9K | TAGCTCCTACTCAGAC |
| | KH34 | ATCACA | | KH43 | TGTTAC |
| 61 | E51SaCas9K | CTTTCTCTGCTTGATC | 62 | E51SaCas9K | CCGACTGGCTTTCTCT |
| | KH35 | AAGTTA | | KH36 | GCTTGA |
| 61 | E51SaCas9K | CTTTCTCTGCTTGATC | 63 | E51SaCas9K | ACTTACCGACTGGCTT |
| | KH35 | AAGTTA | | KH37 | TCTCTG |
| 61 | E51SaCas9K | CTTTCTCTGCTTGATC | 64 | E51SaCas9K | GATGTTGGAGGTACCT |
| | KH35 | AAGTTA | | KH38 | GCTCTG |
| 61 | E51SaCas9K | CTTTCTCTGCTTGATC | 65 | E51SaCas9K | AAATGCCATCTTCCTT |
| | KH35 | AAGTTA | | KH39 | GATGTT |
| 61 | E51SaCas9K | CTTTCTCTGCTTGATC | 66 | E51SaCas9K | CCAAACTAGAAATGCC |
| | KH35 | AAGTTA | | KH40 | ATCTTC |
| 61 | E51SaCas9K | CTTTCTCTGCTTGATC | 67 | E51SaCas9K | AGGAAACTGCCATCTC |
| | KH35 | AAGTTA | | KH41 | CAAACT |
| 61 | E51SaCas9K | CTTTCTCTGCTTGATC | 68 | E51SaCas9K | CTGTTACTCTGGTGAC |
| | KH35 | AAGTTA | | KH42 | ACAACC |
| 61 | E51SaCas9K | CTTTCTCTGCTTGATC | 69 | E51SaCas9K | TAGCTCCTACTCAGAC |
| | KH35 | AAGTTA | | KH43 | TGTTAC |
| 62 | E51SaCas9K | CCGACTGGCTTTCTCT | 63 | E51SaCas9K | ACTTACCGACTGGCTT |
| | KH36 | GCTTGA | | KH37 | TCTCTG |
| 62 | E51SaCas9K | CCGACTGGCTTTCTCT | 64 | E51SaCas9K | GATGTTGGAGGTACCT |
| | KH36 | GCTTGA | | KH38 | GCTCTG |
| 62 | E51SaCas9K | CCGACTGGCTTTCTCT | 65 | E51SaCas9K | AAATGCCATCTTCCTT |
| | KH36 | GCTTGA | | KH39 | GATGTT |
| 62 | E51SaCas9K | CCGACTGGCTTTCTCT | 66 | E51SaCas9K | CCAAACTAGAAATGCC |
| | KH36 | GCTTGA | | KH40 | ATCTTC |
| 62 | E51SaCas9K | CCGACTGGCTTTCTCT | 67 | E51SaCas9K | AGGAAACTGCCATCTC |
| | KH36 | GCTTGA | | KH41 | CAAACT |
| 62 | E51SaCas9K | CCGACTGGCTTTCTCT | 68 | E51SaCas9K | CTGTTACTCTGGTGAC |
| | KH36 | GCTTGA | | KH42 | ACAACC |
| 62 | E51SaCas9K | CCGACTGGCTTTCTCT | 69 | E51SaCas9K | TAGCTCCTACTCAGAC |
| | KH36 | GCTTGA | | KH43 | TGTTAC |
| 63 | E51SaCas9K | ACTTACCGACTGGCTT | 64 | E51SaCas9K | GATGTTGGAGGTACCT |
| | KH37 | TCTCTG | | KH38 | GCTCTG |
| 63 | E51SaCas9K | ACTTACCGACTGGCTT | 65 | E51SaCas9K | AAATGCCATCTTCCTT |
| | KH37 | TCTCTG | | KH39 | GATGTT |
| 63 | E51SaCas9K | ACTTACCGACTGGCTT | 66 | E51SaCas9K | CCAAACTAGAAATGCC |
| | KH37 | TCTCTG | | KH40 | ATCTTC |
| 63 | E51SaCas9K | ACTTACCGACTGGCTT | 67 | E51SaCas9K | AGGAAACTGCCATCTC |
| | KH37 | TCTCTG | | KH41 | CAAACT |
| 63 | E51SaCas9K | ACTTACCGACTGGCTT | 68 | E51SaCas9K | CTGTTACTCTGGTGAC |
| | KH37 | TCTCTG | | KH42 | ACAACC |
| 63 | E51SaCas9K | ACTTACCGACTGGCTT | 69 | E51SaCas9K | TAGCTCCTACTCAGAC |
| | KH37 | TCTCTG | | KH43 | TGTTAC |
| 64 | E51SaCas9K | GATGTTGGAGGTACCT | 65 | E51SaCas9K | AAATGCCATCTTCCTT |
| | KH38 | GCTCTG | | KH39 | GATGTT |
| 64 | E51SaCas9K | GATGTTGGAGGTACCT | 66 | E51SaCas9K | CCAAACTAGAAATGCC |
| | KH38 | GCTCTG | | KH40 | ATCTTC |
| 64 | E51SaCas9K | GATGTTGGAGGTACCT | 67 | E51SaCas9K | AGGAAACTGCCATCTC |
| | KH38 | GCTCTG | | KH41 | CAAACT |
| 64 | E51SaCas9K | GATGTTGGAGGTACCT | 68 | E51SaCas9K | CTGTTACTCTGGTGAC |
| | KH38 | GCTCTG | | KH42 | ACAACC |
| 64 | E51SaCas9K | GATGTTGGAGGTACCT | 69 | E51SaCas9K | TAGCTCCTACTCAGAC |
| | KH38 | GCTCTG | | KH43 | TGTTAC |
| 65 | E51SaCas9K | AAATGCCATCTTCCTT | 66 | E51SaCas9K | CCAAACTAGAAATGCC |
| | KH39 | GATGTT | | KH40 | ATCTTC |
| 65 | E51SaCas9K | AAATGCCATCTTCCTT | 67 | E51SaCas9K | AGGAAACTGCCATCTC |
| | KH39 | GATGTT | | KH41 | CAAACT |
| 65 | E51SaCas9K | AAATGCCATCTTCCTT | 68 | E51SaCas9K | CTGTTACTCTGGTGAC |
| | KH39 | GATGTT | | KH42 | ACAACC |
| 65 | E51SaCas9K | AAATGCCATCTTCCTT | 69 | E51SaCas9K | TAGCTCCTACTCAGAC |
| | KH39 | GATGTT | | KH43 | TGTTAC |
| 66 | E51SaCas9K | CCAAACTAGAAATGCC | 67 | E51SaCas9K | AGGAAACTGCCATCTC |
| | KH40 | ATCTTC | | KH41 | CAAACT |
| 66 | E51SaCas9K | CCAAACTAGAAATGCC | 68 | E51SaCas9K | CTGTTACTCTGGTGAC |
| | KH40 | ATCTTC | | KH42 | ACAACC |
| 66 | E51SaCas9K | CCAAACTAGAAATGCC | 69 | E51SaCas9K | TAGCTCCTACTCAGAC |
| | KH40 | ATCTTC | | KH43 | TGTTAC |
| 67 | E51SaCas9K | AGGAAACTGCCATCTC | 68 | E51SaCas9K | CTGTTACTCTGGTGAC |
| | KH41 | CAAACT | | KH42 | ACAACC |
| 67 | E51SaCas9K | AGGAAACTGCCATCTC | 69 | E51SaCas9K | TAGCTCCTACTCAGAC |
| | KH41 | CAAACT | | KH43 | TGTTAC |
| 68 | E51SaCas9K | CTGTTACTCTGGTGAC | 69 | E51SaCas9K | TAGCTCCTACTCAGAC |
| | KH42 | ACAACC | | KH43 | TGTTAC |

TABLE 1C
Exon 51 SluCas9 guides:

| Seq | Guide ID or | |
|---|---|---|
| ID No. | Guide RNA Name | Guide Sequence |
| 243 | E51Slu1 | TGATCATCTCGTTGATATCCTC |
| 244 | E51Slu2 | TTGATCAAGCAGAGAAAGCCAG |
| 245 | E51Slu3 | AGTCGGTAAGTTCTGTCCAAGC |
| 246 | E51Slu4 | GCCCGGTTGAAATCTGCCAGAG |
| 247 | E51Slu5 | CAGAGCAGGTACCTCCAACATC |
| 248 | E51Slu6 | GGTACCTCCAACATCAAGGAAG |
| 249 | E51Slu7 | CAAGGAAGATGGCATTTCTAGT |
| 250 | E51Slu8 | AGATGGCATTTCTAGTTTGGAG |
| 251 | E51Slu9 | ATGGCAGTTTCCTTAGTAACCA |
| 252 | E51Slu10 | GTCACCAGAGTAACAGTCTGAG |
| 253 | E51Slu15 | CAACGAGATGATCATCAAGCAG |
| 254 | E51Slu16 | GAGGGTGATGGTGGGTGACCTT |
| 255 | E51Slu17 | ATAAAATCACAGAGGGTGATGG |
| 256 | E51Slu18 | TATAAAATCACAGAGGGTGATG |
| 257 | E51Slu19 | AGTTATAAAATCACAGAGGGTG |
| 258 | E51Slu20 | TGATCAAGTTATAAAATCACAG |
| 259 | E51Slu21 | TTGATCAAGTTATAAAATCACA |
| 260 | E51Slu22 | GGGCTTGGACAGAACTTACCGA |
| 261 | E51Slu23 | CTCTGGCAGATTTCAACCGGGC |
| 262 | E51Slu24 | ACCTGCTCTGGCAGATTTCAAC |
| 263 | E51Slu25 | TACCTGCTCTGGCAGATTTCAA |
| 264 | E51Slu26 | CTTGATGTTGGAGGTACCTGCT |
| 265 | E51Slu27 | AATGCCATCTTCCTTGATGTTG |
| 266 | E51Slu28 | AGAAATGCCATCTTCCTTGATG |
| 267 | E51Slu29 | GGTGACACAACCTGTGGTTACT |
| 268 | E51Slu30 | TGTTACTCTGGTGACACAACCT |
| 269 | E51Slu31 | AGCTCCTACTCAGACTGTTACT |

TABLE 1D
Exon 51 SluCas9 pairs:

| Guide 1 | Guide | | Guide 2 | Guide | |
|---|---|---|---|---|---|
| Seq ID No. | 1 | Guide 1 Sequence | Seq ID No. | 2 | Guide 2 Sequence |
| 243 | E51SL1 | TGATCATCTCGTTGATATC | 244 | E51SL2 | TTGATCAAGCAGAGAAAGC |
| | | CTC | | | CAG |
| 243 | E51SL1 | TGATCATCTCGTTGATATC | 245 | E51SL3 | AGTCGGTAAGTTCTGTCCA |
| | | CTC | | | AGC |
| 243 | E51SL1 | TGATCATCTCGTTGATATC | 246 | E51SL4 | GCCCGGTTGAAATCTGCCA |
| | | CTC | | | GAG |
| 243 | E51SL1 | TGATCATCTCGTTGATATC | 247 | E51SL5 | CAGAGCAGGTACCTCCAAC |
| | | CTC | | | ATC |
| 243 | E51SL1 | TGATCATCTCGTTGATATC | 248 | E51SL6 | GGTACCTCCAACATCAAGG |
| | | CTC | | | AAG |
| 243 | E51SL1 | TGATCATCTCGTTGATATC | 249 | E51SL7 | CAAGGAAGATGGCATTTCT |
| | | CTC | | | AGT |
| 243 | E51SL1 | TGATCATCTCGTTGATATC | 250 | E51SL8 | AGATGGCATTTCTAGTTTG |
| | | CTC | | | GAG |
| 243 | E51SL1 | TGATCATCTCGTTGATATC | 251 | E51SL9 | ATGGCAGTTTCCTTAGTAA |
| | | CTC | | | CCA |
| 243 | E51SL1 | TGATCATCTCGTTGATATC | 252 | E51SL10 | GTCACCAGAGTAACAGTCT |
| | | CTC | | | GAG |
| 243 | E51SL1 | TGATCATCTCGTTGATATC | 253 | E51SL15 | CAACGAGATGATCATCAAG |
| | | CTC | | | CAG |
| 243 | E51SL1 | TGATCATCTCGTTGATATC | 254 | E51SL16 | GAGGGTGATGGTGGGTGAC |
| | | CTC | | | CTT |
| 243 | E51SL1 | TGATCATCTCGTTGATATC | 255 | E51SL17 | ATAAAATCACAGAGGGTGA |
| | | CTC | | | TGG |
| 243 | E51SL1 | TGATCATCTCGTTGATATC | 256 | E51SL18 | TATAAAATCACAGAGGGTG |
| | | CTC | | | ATG |
| 243 | E51SL1 | TGATCATCTCGTTGATATC | 257 | E51SL19 | AGTTATAAAATCACAGAGG |
| | | CTC | | | GTG |
| 243 | E51SL1 | TGATCATCTCGTTGATATC | 258 | E51SL20 | TGATCAAGTTATAAAATCA |
| | | CTC | | | CAG |
| 243 | E51SL1 | TGATCATCTCGTTGATATC | 259 | E51SL21 | TTGATCAAGTTATAAAATC |
| | | CTC | | | ACA |
| 243 | E51SL1 | TGATCATCTCGTTGATATC | 260 | E51SL22 | GGGCTTGGACAGAACTTAC |
| | | CTC | | | CGA |
| 243 | E51SL1 | TGATCATCTCGTTGATATC | 261 | E51SL23 | CTCTGGCAGATTTCAACCG |
| | | CTC | | | GGC |
| 243 | E51SL1 | TGATCATCTCGTTGATATC | 262 | E51SL24 | ACCTGCTCTGGCAGATTTC |
| | | CTC | | | AAC |
| 243 | E51SL1 | TGATCATCTCGTTGATATC | 263 | E51SL25 | TACCTGCTCTGGCAGATTT |
| | | CTC | | | CAA |
| 243 | E51SL1 | TGATCATCTCGTTGATATC | 264 | E51SL26 | CTTGATGTTGGAGGTACCT |
| | | CTC | | | GCT |
| 243 | E51SL1 | TGATCATCTCGTTGATATC | 265 | E51SL27 | AATGCCATCTTCCTTGATG |
| | | CTC | | | TTG |
| 243 | E51SL1 | TGATCATCTCGTTGATATC | 266 | E51SL28 | AGAAATGCCATCTTCCTTG |
| | | CTC | | | ATG |
| 243 | E51SL1 | TGATCATCTCGTTGATATC | 267 | E51SL29 | GGTGACACAACCTGTGGTT |
| | | CTC | | | ACT |
| 243 | E51SL1 | TGATCATCTCGTTGATATC | 268 | E51SL30 | TGTTACTCTGGTGACACAA |
| | | CTC | | | CCT |
| 243 | E51SL1 | TGATCATCTCGTTGATATC | 269 | E51SL37 | AGCTCCTACTCAGACTGTT |
| | | CTC | | | ACT |
| 244 | E51SL2 | TTGATCAAGCAGAGAAAGC | 245 | E51SL3 | AGTCGGTAAGTTCTGTCCA |
| | | CAG | | | AGC |
| 244 | E51SL2 | TTGATCAAGCAGAGAAAGC | 246 | E51SL4 | GCCCGGTTGAAATCTGCCA |
| | | CAG | | | GAG |
| 244 | E51SL2 | TTGATCAAGCAGAGAAAGC | 247 | E51SL5 | CAGAGCAGGTACCTCCAAC |
| | | CAG | | | ATC |
| 244 | E51SL2 | TTGATCAAGCAGAGAAAGC | 248 | E51SL6 | GGTACCTCCAACATCAAGG |
| | | CAG | | | AAG |
| 244 | E51SL2 | TTGATCAAGCAGAGAAAGC | 249 | E51SL7 | CAAGGAAGATGGCATTTCT |
| | | CAG | | | AGT |
| 244 | E51SL2 | TTGATCAAGCAGAGAAAGC | 250 | E51SL8 | AGATGGCATTTCTAGTTTG |
| | | CAG | | | GAG |
| 244 | E51SL2 | TTGATCAAGCAGAGAAAGC | 251 | E51SL9 | ATGGCAGTTTCCTTAGTAA |
| | | CAG | | | CCA |
| 244 | E51SL2 | TTGATCAAGCAGAGAAAGC | 252 | E51SL10 | GTCACCAGAGTAACAGTCT |
| | | CAG | | | GAG |
| 244 | E51SL2 | TTGATCAAGCAGAGAAAGC | 253 | E51SL15 | CAACGAGATGATCATCAAG |
| | | CAG | | | CAG |
| 244 | E51SL2 | TTGATCAAGCAGAGAAAGC | 254 | E51SL16 | GAGGGTGATGGTGGGTGAC |
| | | CAG | | | CTT |
| 244 | E51SL2 | TTGATCAAGCAGAGAAAGC | 255 | E51SL17 | ATAAAATCACAGAGGGTGA |
| | | CAG | | | TGG |
| 244 | E51SL2 | TTGATCAAGCAGAGAAAGC | 256 | E51SL18 | TATAAAATCACAGAGGGTG |
| | | CAG | | | ATG |
| 244 | E51SL2 | TTGATCAAGCAGAGAAAGC | 257 | E51SL19 | AGTTATAAAATCACAGAGG |
| | | CAG | | | GTG |
| 244 | E51SL2 | TTGATCAAGCAGAGAAAGC | 258 | E51SL20 | TGATCAAGTTATAAAATCA |
| | | CAG | | | CAG |
| 244 | E51SL2 | TTGATCAAGCAGAGAAAGC | 259 | E51SL21 | TTGATCAAGTTATAAAATC |
| | | CAG | | | ACA |
| 244 | E51SL2 | TTGATCAAGCAGAGAAAGC | 260 | E51SL22 | GGGCTTGGACAGAACTTAC |
| | | CAG | | | CGA |
| 244 | E51SL2 | TTGATCAAGCAGAGAAAGC | 261 | E51SL23 | CTCTGGCAGATTTCAACCG |
| | | CAG | | | GGC |
| 244 | E51SL2 | TTGATCAAGCAGAGAAAGC | 262 | E51SL24 | ACCTGCTCTGGCAGATTTC |
| | | CAG | | | AAC |
| 244 | E51SL2 | TTGATCAAGCAGAGAAAGC | 263 | E51SL25 | TACCTGCTCTGGCAGATTT |
| | | CAG | | | CAA |
| 244 | E51SL2 | TTGATCAAGCAGAGAAAGC | 264 | E51SL26 | CTTGATGTTGGAGGTACCT |
| | | CAG | | | GCT |
| 244 | E51SL2 | TTGATCAAGCAGAGAAAGC | 265 | E51SL27 | AATGCCATCTTCCTTGATG |
| | | CAG | | | TTG |
| 244 | E51SL2 | TTGATCAAGCAGAGAAAGC | 266 | E51SL28 | AGAAATGCCATCTTCCTTG |
| | | CAG | | | ATG |
| 244 | E51SL2 | TTGATCAAGCAGAGAAAGC | 267 | E51SL29 | GGTGACACAACCTGTGGTT |
| | | CAG | | | ACT |
| 244 | E51SL2 | TTGATCAAGCAGAGAAAGC | 268 | E51SL30 | TGTTACTCTGGTGACACAA |
| | | CAG | | | CCT |
| 244 | E51SL2 | TTGATCAAGCAGAGAAAGC | 269 | E51SL31 | AGCTCCTACTCAGACTGTT |
| | | CAG | | | ACT |
| 245 | E51SL3 | AGTCGGTAAGTTCTGTCCA | 246 | E51SL4 | GCCCGGTTGAAATCTGCCA |
| | | AGC | | | GAG |
| 245 | E51SL3 | AGTCGGTAAGTTCTGTCCA | 247 | E51SL5 | CAGAGCAGGTACCTCCAAC |
| | | AGC | | | ATC |
| 245 | E51SL3 | AGTCGGTAAGTTCTGTCCA | 248 | E51SL6 | GGTACCTCCAACATCAAGG |
| | | AGC | | | AAG |
| 245 | E51SL3 | AGTCGGTAAGTTCTGTCCA | 249 | E51SL7 | CAAGGAAGATGGCATTTCT |
| | | AGC | | | AGT |
| 245 | E51SL3 | AGTCGGTAAGTTCTGTCCA | 250 | E51SL8 | AGATGGCATTTCTAGTTTG |
| | | AGC | | | GAG |
| 245 | E51SL3 | AGTCGGTAAGTTCTGTCCA | 251 | E51SL9 | ATGGCAGTTTCCTTAGTAA |
| | | AGC | | | CCA |
| 245 | E51SL3 | AGTCGGTAAGTTCTGTCCA | 252 | E51SL10 | GTCACCAGAGTAACAGTCT |
| | | AGC | | | GAG |
| 245 | E51SL3 | AGTCGGTAAGTTCTGTCCA | 253 | E51SL15 | CAACGAGATGATCATCAAG |
| | | AGC | | | CAG |
| 245 | E51SL3 | AGTCGGTAAGTTCTGTCCA | 254 | E51SL16 | GAGGGTGATGGTGGGTGAC |
| | | AGC | | | CTT |
| 245 | E51SL3 | AGTCGGTAAGTTCTGTCCA | 255 | E51SL17 | ATAAAATCACAGAGGGTGA |
| | | AGC | | | TGG |
| 245 | E51SL3 | AGTCGGTAAGTTCTGTCCA | 256 | E51SL18 | TATAAAATCACAGAGGGTG |
| | | AGC | | | ATG |
| 245 | E51SL3 | AGTCGGTAAGTTCTGTCCA | 257 | E51SL19 | AGTTATAAAATCACAGAGG |
| | | AGC | | | GTG |
| 245 | E51SL3 | AGTCGGTAAGTTCTGTCCA | 258 | E51SL20 | TGATCAAGTTATAAAATCA |
| | | AGC | | | CAG |
| 245 | E51SL3 | AGTCGGTAAGTTCTGTCCA | 259 | E51SL21 | TTGATCAAGTTATAAAATC |
| | | AGC | | | ACA |
| 245 | E51SL3 | AGTCGGTAAGTTCTGTCCA | 260 | E51SL22 | GGGCTTGGACAGAACTTAC |
| | | AGC | | | CGA |
| 245 | E51SL3 | AGTCGGTAAGTTCTGTCCA | 261 | E51SL23 | CTCTGGCAGATTTCAACCG |
| | | AGC | | | GGC |
| 245 | E51SL3 | AGTCGGTAAGTTCTGTCCA | 262 | E51SL24 | ACCTGCTCTGGCAGATTTC |
| | | AGC | | | AAC |
| 245 | E51SL3 | AGTCGGTAAGTTCTGTCCA | 263 | E51SL25 | TACCTGCTCTGGCAGATTT |
| | | AGC | | | CAA |
| 245 | E51SL3 | AGTCGGTAAGTTCTGTCCA | 264 | E51SL26 | CTTGATGTTGGAGGTACCT |
| | | AGC | | | GCT |
| 245 | E51SL3 | AGTCGGTAAGTTCTGTCCA | 265 | E51SL27 | AATGCCATCTTCCTTGATG |
| | | AGC | | | TTG |
| 245 | E51SL3 | AGTCGGTAAGTTCTGTCCA | 266 | E51SL28 | AGAAATGCCATCTTCCTTG |
| | | AGC | | | ATG |
| 245 | E51SL3 | AGTCGGTAAGTTCTGTCCA | 267 | E51SL29 | GGTGACACAACCTGTGGTT |
| | | AGC | | | ACT |
| 245 | E51SL3 | AGTCGGTAAGTTCTGTCCA | 268 | E51SL30 | TGTTACTCTGGTGACACAA |
| | | AGC | | | CCT |
| 245 | E51SL3 | AGTCGGTAAGTTCTGTCCA | 269 | E51SL31 | AGCTCCTACTCAGACTGTT |
| | | AGC | | | ACT |
| 246 | E51SL4 | GCCCGGTTGAAATCTGCCA | 247 | E51SL5 | CAGAGCAGGTACCTCCAAC |
| | | GAG | | | ATC |
| 246 | E51SL4 | GCCCGGTTGAAATCTGCCA | 248 | E51SL6 | GGTACCTCCAACATCAAGG |
| | | GAG | | | AAG |
| 246 | E51SL4 | GCCCGGTTGAAATCTGCCA | 249 | E51SL7 | CAAGGAAGATGGCATTTCT |
| | | GAG | | | AGT |
| 246 | E51SL4 | GCCCGGTTGAAATCTGCCA | 250 | E51SL8 | AGATGGCATTTCTAGTTTG |
| | | GAG | | | GAG |
| 246 | E51SL4 | GCCCGGTTGAAATCTGCCA | 251 | E51SL9 | ATGGCAGTTTCCTTAGTAA |
| | | GAG | | | CCA |
| 246 | E51SL4 | GCCCGGTTGAAATCTGCCA | 252 | E51SL10 | GTCACCAGAGTAACAGTCT |
| | | GAG | | | GAG |
| 246 | E51SL4 | GCCCGGTTGAAATCTGCCA | 253 | E51SL15 | CAACGAGATGATCATCAAG |
| | | GAG | | | CAG |
| 246 | E51SL4 | GCCCGGTTGAAATCTGCCA | 254 | E51SL16 | GAGGGTGATGGTGGGTGAC |
| | | GAG | | | CTT |
| 246 | E51SL4 | GCCCGGTTGAAATCTGCCA | 255 | E51SL17 | ATAAAATCACAGAGGGTGA |
| | | GAG | | | TGG |
| 246 | E51SL4 | GCCCGGTTGAAATCTGCCA | 256 | E51SL18 | TATAAAATCACAGAGGGTG |
| | | GAG | | | ATG |
| 246 | E51SL4 | GCCCGGTTGAAATCTGCCA | 257 | E51SL19 | AGTTATAAAATCACAGAGG |
| | | GAG | | | GTG |
| 246 | E51SL4 | GCCCGGTTGAAATCTGCCA | 258 | E51SL20 | TGATCAAGTTATAAAATCA |
| | | GAG | | | CAG |
| 246 | E51SL4 | GCCCGGTTGAAATCTGCCA | 259 | E51SL21 | TTGATCAAGTTATAAAATC |
| | | GAG | | | ACA |
| 246 | E51SL4 | GCCCGGTTGAAATCTGCCA | 260 | E51SL22 | GGGCTTGGACAGAACTTAC |
| | | GAG | | | CGA |
| 246 | E51SL4 | GCCCGGTTGAAATCTGCCA | 261 | E51SL23 | CTCTGGCAGATTTCAACCG |
| | | GAG | | | GGC |
| 246 | E51SL4 | GCCCGGTTGAAATCTGCCA | 262 | E51SL24 | ACCTGCTCTGGCAGATTTC |
| | | GAG | | | AAC |
| 246 | E51SL4 | GCCCGGTTGAAATCTGCCA | 263 | E51SL25 | TACCTGCTCTGGCAGATTT |
| | | GAG | | | CAA |
| 246 | E51SL4 | GCCCGGTTGAAATCTGCCA | 264 | E51SL26 | CTTGATGTTGGAGGTACCT |
| | | GAG | | | GCT |
| 246 | E51SL4 | GCCCGGTTGAAATCTGCCA | 265 | E51SL27 | AATGCCATCTTCCTTGATG |
| | | GAG | | | TTG |
| 246 | E51SL4 | GCCCGGTTGAAATCTGCCA | 266 | E51SL28 | AGAAATGCCATCTTCCTTG |
| | | GAG | | | ATG |
| 246 | E51SL4 | GCCCGGTTGAAATCTGCCA | 267 | E51SL29 | GGTGACACAACCTGTGGTT |
| | | GAG | | | ACT |
| 246 | E51SL4 | GCCCGGTTGAAATCTGCCA | 268 | E51SL30 | TGTTACTCTGGTGACACAA |
| | | GAG | | | CCT |
| 246 | E51SL4 | GCCCGGTTGAAATCTGCCA | 269 | E51SL31 | AGCTCCTACTCAGACTGTT |
| | | GAG | | | ACT |
| 247 | E51SL5 | CAGAGCAGGTACCTCCAAC | 248 | E51SL6 | GGTACCTCCAACATCAAGG |
| | | ATC | | | AAG |
| 247 | E51SL5 | CAGAGCAGGTACCTCCAAC | 249 | E51SL7 | CAAGGAAGATGGCATTTCT |
| | | ATC | | | AGT |
| 247 | E51SL5 | CAGAGCAGGTACCTCCAAC | 250 | E51SL8 | AGATGGCATTTCTAGTTTG |
| | | ATC | | | GAG |
| 247 | E51SL5 | CAGAGCAGGTACCTCCAAC | 251 | E51SL9 | ATGGCAGTTTCCTTAGTAA |
| | | ATC | | | CCA |
| 247 | E51SL5 | CAGAGCAGGTACCTCCAAC | 252 | E51SL10 | GTCACCAGAGTAACAGTCT |
| | | ATC | | | GAG |
| 247 | E51SL5 | CAGAGCAGGTACCTCCAAC | 253 | E51SL15 | CAACGAGATGATCATCAAG |
| | | ATC | | | CAG |
| 247 | E51SL5 | CAGAGCAGGTACCTCCAAC | 254 | E51SL16 | GAGGGTGATGGTGGGTGAC |
| | | ATC | | | CTT |
| 247 | E51SL5 | CAGAGCAGGTACCTCCAAC | 255 | E51SL17 | ATAAAATCACAGAGGGTGA |
| | | ATC | | | TGG |
| 247 | E51SL5 | CAGAGCAGGTACCTCCAAC | 256 | E51SL18 | TATAAAATCACAGAGGGTG |
| | | ATC | | | ATG |
| 247 | E51SL5 | CAGAGCAGGTACCTCCAAC | 257 | E51SL19 | AGTTATAAAATCACAGAGG |
| | | ATC | | | GTG |
| 247 | E51SL5 | CAGAGCAGGTACCTCCAAC | 258 | E51SL20 | TGATCAAGTTATAAAATCA |
| | | ATC | | | CAG |
| 247 | E51SL5 | CAGAGCAGGTACCTCCAAC | 259 | E51SL21 | TTGATCAAGTTATAAAATC |
| | | ATC | | | ACA |
| 247 | E51SL5 | CAGAGCAGGTACCTCCAAC | 260 | E51SL22 | GGGCTTGGACAGAACTTAC |
| | | ATC | | | CGA |
| 247 | E51SL5 | CAGAGCAGGTACCTCCAAC | 261 | E51SL23 | CTCTGGCAGATTTCAACCG |
| | | ATC | | | GGC |
| 247 | E51SL5 | CAGAGCAGGTACCTCCAAC | 262 | E51SL24 | ACCTGCTCTGGCAGATTTC |
| | | ATC | | | AAC |
| 247 | E51SL5 | CAGAGCAGGTACCTCCAAC | 263 | E51SL25 | TACCTGCTCTGGCAGATTT |
| | | ATC | | | CAA |
| 247 | E51SL5 | CAGAGCAGGTACCTCCAAC | 264 | E51SL25 | CTTGATGTTGGAGGTACCT |
| | | ATC | | | GCT |
| 247 | E51SL5 | CAGAGCAGGTACCTCCAAC | 265 | E51SL27 | AATGCCATCTTCCTTGATG |
| | | ATC | | | TTG |
| 247 | E51SL5 | CAGAGCAGGTACCTCCAAC | 266 | E51SL28 | AGAAATGCCATCTTCCTTG |
| | | ATC | | | ATG |
| 247 | E51SL5 | CAGAGCAGGTACCTCCAAC | 267 | E51SL29 | GGTGACACAACCTGTGGTT |
| | | ATC | | | ACT |
| 247 | E51SL5 | CAGAGCAGGTACCTCCAAC | 268 | E51SL30 | TGTTACTCTGGTGACACAA |
| | | ATC | | | CCT |
| 247 | E51SL5 | CAGAGCAGGTACCTCCAAC | 269 | E51SL31 | AGCTCCTACTCAGACTGTT |
| | | ATC | | | ACT |
| 248 | E51SL6 | GGTACCTCCAACATCAAGG | 249 | E51SL7 | CAAGGAAGATGGCATTTCT |
| | | AAG | | | AGT |
| 248 | E51SL6 | GGTACCTCCAACATCAAGG | 250 | E51SL8 | AGATGGCATTTCTAGTTTG |
| | | AAG | | | GAG |
| 248 | E51SL6 | GGTACCTCCAACATCAAGG | 251 | E51SL9 | ATGGCAGTTTCCTTAGTAA |
| | | AAG | | | CCA |
| 248 | E51SL6 | GGTACCTCCAACATCAAGG | 252 | E51SL10 | GTCACCAGAGTAACAGTCT |
| | | AAG | | | GAG |
| 248 | E51SL6 | GGTACCTCCAACATCAAGG | 253 | E51SL15 | CAACGAGATGATCATCAAG |
| | | AAG | | | CAG |
| 248 | E51SL6 | GGTACCTCCAACATCAAGG | 254 | E51SL16 | GAGGGTGATGGTGGGTGAC |
| | | AAG | | | CTT |
| 248 | E51SL6 | GGTACCTCCAACATCAAGG | 255 | E51SL17 | ATAAAATCACAGAGGGTGA |
| | | AAG | | | TGG |
| 248 | E51SL6 | GGTACCTCCAACATCAAGG | 256 | E51SL18 | TATAAAATCACAGAGGGTG |
| | | AAG | | | ATG |
| 248 | E51SL6 | GGTACCTCCAACATCAAGG | 257 | E51SL19 | AGTTATAAAATCACAGAGG |
| | | AAG | | | GTG |
| 248 | E51SL6 | GGTACCTCCAACATCAAGG | 258 | E51SL20 | TGATCAAGTTATAAAATCA |
| | | AAG | | | CAG |
| 248 | E51SL6 | GGTACCTCCAACATCAAGG | 259 | E51SL21 | TTGATCAAGTTATAAAATC |
| | | AAG | | | ACA |
| 248 | E51SL6 | GGTACCTCCAACATCAAGG | 260 | E51SL22 | GGGCTTGGACAGAACTTAC |
| | | AAG | | | CGA |
| 248 | E51SL6 | GGTACCTCCAACATCAAGG | 261 | E51SL23 | CTCTGGCAGATTTCAACCG |
| | | AAG | | | GGC |
| 248 | E51SL6 | GGTACCTCCAACATCAAGG | 262 | E51SL24 | ACCTGCTCTGGCAGATTTC |
| | | AAG | | | AAC |
| 248 | E51SL6 | GGTACCTCCAACATCAAGG | 263 | E51SL25 | TACCTGCTCTGGCAGATTT |
| | | AAG | | | CAA |
| 248 | E51SL6 | GGTACCTCCAACATCAAGG | 264 | E51SL26 | CTTGATGTTGGAGGTACCT |
| | | AAG | | | GCT |
| 248 | E51SL6 | GGTACCTCCAACATCAAGG | 265 | E51SL27 | AATGCCATCTTCCTTGATG |
| | | AAG | | | TTG |
| 248 | E51SL6 | GGTACCTCCAACATCAAGG | 266 | E51SL28 | AGAAATGCCATCTTCCTTG |
| | | AAG | | | ATG |
| 248 | E51SL6 | GGTACCTCCAACATCAAGG | 267 | E51SL29 | GGTGACACAACCTGTGGTT |
| | | AAG | | | ACT |
| 248 | E51SL6 | GGTACCTCCAACATCAAGG | 268 | E51SL30 | TGTTACTCTGGTGACACAA |
| | | AAG | | | CCT |
| 248 | E51SL6 | GGTACCTCCAACATCAAGG | 269 | E51SL31 | AGCTCCTACTCAGACTGTT |
| | | AAG | | | ACT |
| 249 | E51SL7 | CAAGGAAGATGGCATTTCT | 250 | E51SL8 | AGATGGCATTTCTAGTTTG |
| | | AGT | | | GAG |
| 249 | E51SL7 | CAAGGAAGATGGCATTTCT | 251 | E51SL9 | ATGGCAGTTTCCTTAGTAA |
| | | AGT | | | CCA |
| 249 | E51SL7 | CAAGGAAGATGGCATTTCT | 252 | E51SL10 | GTCACCAGAGTAACAGTCT |
| | | AGT | | | GAG |
| 249 | E51SL7 | CAAGGAAGATGGCATTTCT | 253 | E51SL15 | CAACGAGATGATCATCAAG |
| | | AGT | | | CAG |
| 249 | E51SL7 | CAAGGAAGATGGCATTTCT | 254 | E51SL16 | GAGGGTGATGGTGGGTGAC |
| | | AGT | | | CTT |
| 249 | E51SL7 | CAAGGAAGATGGCATTTCT | 255 | E51SL17 | ATAAAATCACAGAGGGTGA |
| | | AGT | | | TGG |
| 249 | E51SL7 | CAAGGAAGATGGCATTTCT | 256 | E51SL18 | TATAAAATCACAGAGGGTG |
| | | AGT | | | ATG |
| 249 | E51SL7 | CAAGGAAGATGGCATTTCT | 257 | E51SL19 | AGTTATAAAATCACAGAGG |
| | | AGT | | | GTG |
| 249 | E51SL7 | CAAGGAAGATGGCATTTCT | 258 | E51SL20 | TGATCAAGTTATAAAATCA |
| | | AGT | | | CAG |
| 249 | E51SL7 | CAAGGAAGATGGCATTTCT | 259 | E51SL21 | TTGATCAAGTTATAAAATC |
| | | AGT | | | ACA |
| 249 | E51SL7 | CAAGGAAGATGGCATTTCT | 260 | E51SL22 | GGGCTTGGACAGAACTTAC |
| | | AGT | | | CGA |
| 249 | E51SL7 | CAAGGAAGATGGCATTTCT | 261 | E51SL23 | CTCTGGCAGATTTCAACCG |
| | | AGT | | | GGC |
| 249 | E51SL7 | CAAGGAAGATGGCATTTCT | 262 | E51SL24 | ACCTGCTCTGGCAGATTTC |
| | | AGT | | | AAC |
| 249 | E51SL7 | CAAGGAAGATGGCATTTCT | 263 | E51SL25 | TACCTGCTCTGGCAGATTT |
| | | AGT | | | CAA |
| 249 | E51SL7 | CAAGGAAGATGGCATTTCT | 264 | E51SL26 | CTTGATGTTGGAGGTACCT |
| | | AGT | | | GCT |
| 249 | E51SL7 | CAAGGAAGATGGCATTTCT | 265 | E51SL27 | AATGCCATCTTCCTTGATG |
| | | AGT | | | TTG |
| 249 | E51SL7 | CAAGGAAGATGGCATTTCT | 266 | E51SL28 | AGAAATGCCATCTTCCTTG |
| | | AGT | | | ATG |
| 249 | E51SL7 | CAAGGAAGATGGCATTTCT | 267 | E51SL29 | GGTGACACAACCTGTGGTT |
| | | AGT | | | ACT |
| 249 | E51SL7 | CAAGGAAGATGGCATTTCT | 268 | E51SL30 | TGTTACTCTGGTGACACAA |
| | | AGT | | | CCT |
| 249 | E51SL7 | CAAGGAAGATGGCATTTCT | 269 | E51SL31 | AGCTCCTACTCAGACTGTT |
| | | AGT | | | ACT |
| 250 | E51SL8 | AGATGGCATTTCTAGTTTG | 251 | E51SL9 | ATGGCAGTTTCCTTAGTAA |
| | | GAG | | | CCA |
| 250 | E51SL8 | AGATGGCATTTCTAGTTTG | 252 | E51SL10 | GTCACCAGAGTAACAGTCT |
| | | GAG | | | GAG |
| 250 | E51SL8 | AGATGGCATTTCTAGTTTG | 253 | E51SL15 | CAACGAGATGATCATCAAG |
| | | GAG | | | CAG |
| 250 | E51SL8 | AGATGGCATTTCTAGTTTG | 254 | E51SL16 | GAGGGTGATGGTGGGTGAC |
| | | GAG | | | CTT |
| 250 | E51SL8 | AGATGGCATTTCTAGTTTG | 255 | E51SL17 | ATAAAATCACAGAGGGTGA |
| | | GAG | | | TGG |
| 250 | E51SL8 | AGATGGCATTTCTAGTTTG | 256 | E51SL18 | TATAAAATCACAGAGGGTG |
| | | GAG | | | ATG |
| 250 | E51SL8 | AGATGGCATTTCTAGTTTG | 257 | E51SL19 | AGTTATAAAATCACAGAGG |
| | | GAG | | | GTG |
| 250 | E51SL8 | AGATGGCATTTCTAGTTTG | 258 | E51SL20 | TGATCAAGTTATAAAATCA |
| | | GAG | | | CAG |
| 250 | E51SL8 | AGATGGCATTTCTAGTTTG | 259 | E51SL21 | TTGATCAAGTTATAAAATC |
| | | GAG | | | ACA |
| 250 | E51SL8 | AGATGGCATTTCTAGTTTG | 260 | E51SL22 | GGGCTTGGACAGAACTTAC |
| | | GAG | | | CGA |
| 250 | E51SL8 | AGATGGCATTTCTAGTTTG | 261 | E51SL23 | CTCTGGCAGATTTCAACCG |
| | | GAG | | | GGC |
| 250 | E51SL8 | AGATGGCATTTCTAGTTTG | 262 | E51SL24 | ACCTGCTCTGGCAGATTTC |
| | | GAG | | | AAC |
| 250 | E51SL8 | AGATGGCATTTCTAGTTTG | 263 | E51SL25 | TACCTGCTCTGGCAGATTT |
| | | GAG | | | CAA |
| 250 | E51SL8 | AGATGGCATTTCTAGTTTG | 264 | E51SL26 | CTTGATGTTGGAGGTACCT |
| | | GAG | | | GCT |
| 250 | E51SL8 | AGATGGCATTTCTAGTTTG | 265 | E51SL27 | AATGCCATCTTCCTTGATG |
| | | GAG | | | TTG |
| 250 | E51SL8 | AGATGGCATTTCTAGTTTG | 266 | E51SL28 | AGAAATGCCATCTTCCTTG |
| | | GAG | | | ATG |
| 250 | E51SL8 | AGATGGCATTTCTAGTTTG | 267 | E51SL29 | GGTGACACAACCTGTGGTT |
| | | GAG | | | ACT |
| 250 | E51SL8 | AGATGGCATTTCTAGTTTG | 268 | E51SL30 | TGTTACTCTGGTGACACAA |
| | | GAG | | | CCT |
| 250 | E51SL8 | AGATGGCATTTCTAGTTTG | 269 | E51SL31 | AGCTCCTACTCAGACTGTT |
| | | GAG | | | ACT |
| 251 | E51SL9 | ATGGCAGTTTCCTTAGTAA | 252 | E51SL10 | GTCACCAGAGTAACAGTCT |
| | | CCA | | | GAG |
| 251 | E51SL9 | ATGGCAGTTTCCTTAGTAA | 253 | E51SL15 | CAACGAGATGATCATCAAG |
| | | CCA | | | CAG |
| 251 | E51SL9 | ATGGCAGTTTCCTTAGTAA | 254 | E51SL16 | GAGGGTGATGGTGGGTGAC |
| | | CCA | | | CTT |
| 251 | E51SL9 | ATGGCAGTTTCCTTAGTAA | 255 | E51SL17 | ATAAAATCACAGAGGGTGA |
| | | CCA | | | TGG |
| 251 | E51SL9 | ATGGCAGTTTCCTTAGTAA | 256 | E51SL18 | TATAAAATCACAGAGGGTG |
| | | CCA | | | ATG |
| 251 | E51SL9 | ATGGCAGTTTCCTTAGTAA | 257 | E51SL19 | AGTTATAAAATCACAGAGG |
| | | CCA | | | GTG |
| 251 | E51SL9 | ATGGCAGTTTCCTTAGTAA | 258 | E51SL20 | TGATCAAGTTATAAAATCA |
| | | CCA | | | CAG |
| 251 | E51SL9 | ATGGCAGTTTCCTTAGTAA | 259 | E51SL21 | TTGATCAAGTTATAAAATC |
| | | CCA | | | ACA |
| 251 | E51SL9 | ATGGCAGTTTCCTTAGTAA | 260 | E51SL22 | GGGCTTGGACAGAACTTAC |
| | | CCA | | | CGA |
| 251 | E51SL9 | ATGGCAGTTTCCTTAGTAA | 261 | E51SL23 | CTCTGGCAGATTTCAACCG |
| | | CCA | | | GGC |
| 251 | E51SL9 | ATGGCAGTTTCCTTAGTAA | 262 | E51SL24 | ACCTGCTCTGGCAGATTTC |
| | | CCA | | | AAC |
| 251 | E51SL9 | ATGGCAGTTTCCTTAGTAA | 263 | E51SL25 | TACCTGCTCTGGCAGATTT |
| | | CCA | | | CAA |
| 251 | E51SL9 | ATGGCAGTTTCCTTAGTAA | 264 | E51SL26 | CTTGATGTTGGAGGTACCT |
| | | CCA | | | GCT |
| 251 | E51SL9 | ATGGCAGTTTCCTTAGTAA | 265 | E51SL27 | AATGCCATCTTCCTTGATG |
| | | CCA | | | TTG |
| 251 | E51SL9 | ATGGCAGTTTCCTTAGTAA | 266 | E51SL28 | AGAAATGCCATCTTCCTTG |
| | | CCA | | | ATG |
| 251 | E51SL9 | ATGGCAGTTTCCTTAGTAA | 267 | E51SL29 | GGTGACACAACCTGTGGTT |
| | | CCA | | | ACT |
| 251 | E51SL9 | ATGGCAGTTTCCTTAGTAA | 268 | E51SL30 | TGTTACTCTGGTGACACAA |
| | | CCA | | | CCT |
| 251 | E51SL9 | ATGGCAGTTTCCTTAGTAA | 269 | E51SL31 | AGCTCCTACTCAGACTGTT |
| | | CCA | | | ACT |
| 252 | E51SL10 | GTCACCAGAGTAACAGTCT | 253 | E51SL15 | CAACGAGATGATCATCAAG |
| | | GAG | | | CAG |
| 252 | E51SL10 | GTCACCAGAGTAACAGTCT | 254 | E51SL16 | GAGGGTGATGGTGGGTGAC |
| | | GAG | | | CTT |
| 252 | E51SL10 | GTCACCAGAGTAACAGTCT | 255 | E51SL17 | ATAAAATCACAGAGGGTGA |
| | | GAG | | | TGG |
| 252 | E51SL10 | GTCACCAGAGTAACAGTCT | 256 | E51SL18 | TATAAAATCACAGAGGGTG |
| | | GAG | | | ATG |
| 252 | E51SL10 | GTCACCAGAGTAACAGTCT | 257 | E51SL19 | AGTTATAAAATCACAGAGG |
| | | GAG | | | GTG |
| 252 | E51SL10 | GTCACCAGAGTAACAGTCT | 258 | E51SL20 | TGATCAAGTTATAAAATCA |
| | | GAG | | | CAG |
| 252 | E51SL10 | GTCACCAGAGTAACAGTCT | 259 | E51SL21 | TTGATCAAGTTATAAAATC |
| | | GAG | | | ACA |
| 252 | E51SL10 | GTCACCAGAGTAACAGTCT | 260 | E51SL22 | GGGCTTGGACAGAACTTAC |
| | | GAG | | | CGA |
| 252 | E51SL10 | GTCACCAGAGTAACAGTCT | 261 | E51SL23 | CTCTGGCAGATTTCAACCG |
| | | GAG | | | GGC |
| 252 | E51SL10 | GTCACCAGAGTAACAGTCT | 262 | E51SL24 | ACCTGCTCTGGCAGATTTC |
| | | GAG | | | AAC |
| 252 | E51SL10 | GTCACCAGAGTAACAGTCT | 263 | E51SL25 | TACCTGCTCTGGCAGATTT |
| | | GAG | | | CAA |
| 252 | E51SL10 | GTCACCAGAGTAACAGTCT | 264 | E51SL26 | CTTGATGTTGGAGGTACCT |
| | | GAG | | | GCT |
| 252 | E51SL10 | GTCACCAGAGTAACAGTCT | 265 | E51SL27 | AATGCCATCTTCCTTGATG |
| | | GAG | | | TTG |
| 252 | E51SL10 | GTCACCAGAGTAACAGTCT | 266 | E51SL28 | AGAAATGCCATCTTCCTTG |
| | | GAG | | | ATG |
| 252 | E51SL10 | GTCACCAGAGTAACAGTCT | 267 | E51SL29 | GGTGACACAACCTGTGGTT |
| | | GAG | | | ACT |
| 252 | E51SL10 | GTCACCAGAGTAACAGTCT | 268 | E51SL30 | TGTTACTCTGGTGACACAA |
| | | GAG | | | CCT |
| 252 | E51SL10 | GTCACCAGAGTAACAGTCT | 269 | E51SL31 | AGCTCCTACTCAGACTGTT |
| | | GAG | | | ACT |
| 253 | E51SL15 | CAACGAGATGATCATCAAG | 254 | E51SL16 | GAGGGTGATGGTGGGTGAC |
| | | CAG | | | CTT |
| 253 | E51SL15 | CAACGAGATGATCATCAAG | 255 | E51SL17 | ATAAAATCACAGAGGGTGA |
| | | CAG | | | TGG |
| 253 | E51SL15 | CAACGAGATGATCATCAAG | 256 | E51SL18 | TATAAAATCACAGAGGGTG |
| | | CAG | | | ATG |
| 253 | E51SL15 | CAACGAGATGATCATCAAG | 257 | E51SL19 | AGTTATAAAATCACAGAGG |
| | | CAG | | | GTG |
| 253 | E51SL15 | CAACGAGATGATCATCAAG | 258 | E51SL20 | TGATCAAGTTATAAAATCA |
| | | CAG | | | CAG |
| 253 | E51SL15 | CAACGAGATGATCATCAAG | 259 | E51SL21 | TTGATCAAGTTATAAAATC |
| | | CAG | | | ACA |
| 253 | E51SL15 | CAACGAGATGATCATCAAG | 260 | E51SL22 | GGGCTTGGACAGAACTTAC |
| | | CAG | | | CGA |
| 253 | E51SL15 | CAACGAGATGATCATCAAG | 261 | E51SL23 | CTCTGGCAGATTTCAACCG |
| | | CAG | | | GGC |
| 253 | E51SL15 | CAACGAGATGATCATCAAG | 262 | E51SL24 | ACCTGCTCTGGCAGATTTC |
| | | CAG | | | AAC |
| 253 | E51SL15 | CAACGAGATGATCATCAAG | 263 | E51SL25 | TACCTGCTCTGGCAGATTT |
| | | CAG | | | CAA |
| 253 | E51SL15 | CAACGAGATGATCATCAAG | 264 | E51SL26 | CTTGATGTTGGAGGTACCT |
| | | CAG | | | GCT |
| 253 | E51SL15 | CAACGAGATGATCATCAAG | 265 | E51SL27 | AATGCCATCTTCCTTGATG |
| | | CAG | | | TTG |
| 253 | E51SL15 | CAACGAGATGATCATCAAG | 266 | E51SL28 | AGAAATGCCATCTTCCTTG |
| | | CAG | | | ATG |
| 253 | E51SL15 | CAACGAGATGATCATCAAG | 267 | E51SL29 | GGTGACACAACCTGTGGTT |
| | | CAG | | | ACT |
| 253 | E51SL15 | CAACGAGATGATCATCAAG | 268 | E51SL30 | TGTTACTCTGGTGACACAA |
| | | CAG | | | CCT |
| 253 | E51SL15 | CAACGAGATGATCATCAAG | 269 | E51SL31 | AGCTCCTACTCAGACTGTT |
| | | CAG | | | ACT |
| 254 | E51SL16 | GAGGGTGATGGTGGGTGAC | 255 | E51SL17 | ATAAAATCACAGAGGGTGA |
| | | CTT | | | TGG |
| 254 | E51SL16 | GAGGGTGATGGTGGGTGAC | 256 | E51SL18 | TATAAAATCACAGAGGGTG |
| | | CTT | | | ATG |
| 254 | E51SL16 | GAGGGTGATGGTGGGTGAC | 257 | E51SL19 | AGTTATAAAATCACAGAGG |
| | | CTT | | | GTG |
| 254 | E51SL16 | GAGGGTGATGGTGGGTGAC | 258 | E51SL20 | TGATCAAGTTATAAAATCA |
| | | CTT | | | CAG |
| 254 | E51SL16 | GAGGGTGATGGTGGGTGAC | 259 | E51SL21 | TTGATCAAGTTATAAAATC |
| | | CTT | | | ACA |
| 254 | E51SL16 | GAGGGTGATGGTGGGTGAC | 260 | E51SL22 | GGGCTTGGACAGAACTTAC |
| | | CTT | | | CGA |
| 254 | E51SL16 | GAGGGTGATGGTGGGTGAC | 261 | E51SL23 | CTCTGGCAGATTTCAACCG |
| | | CTT | | | GGC |
| 254 | E51SL16 | GAGGGTGATGGTGGGTGAC | 262 | E51SL24 | ACCTGCTCTGGCAGATTTC |
| | | CTT | | | AAC |
| 254 | E51SL16 | GAGGGTGATGGTGGGTGAC | 263 | E51SL25 | TACCTGCTCTGGCAGATTT |
| | | CTT | | | CAA |
| 254 | E51SL16 | GAGGGTGATGGTGGGTGAC | 264 | E51SL26 | CTTGATGTTGGAGGTACCT |
| | | CTT | | | GCT |
| 254 | E51SL16 | GAGGGTGATGGTGGGTGAC | 265 | E51SL27 | AATGCCATCTTCCTTGATG |
| | | CTT | | | TTG |
| 254 | E51SL16 | GAGGGTGATGGTGGGTGAC | 266 | E51SL28 | AGAAATGCCATCTTCCTTG |
| | | CTT | | | ATG |
| 254 | E51SL16 | GAGGGTGATGGTGGGTGAC | 267 | E51SL29 | GGTGACACAACCTGTGGTT |
| | | CTT | | | ACT |
| 254 | E51SL16 | GAGGGTGATGGTGGGTGAC | 268 | E51SL30 | TGTTACTCTGGTGACACAA |
| | | CTT | | | CCT |
| 254 | E51SL16 | GAGGGTGATGGTGGGTGAC | 269 | E51SL31 | AGCTCCTACTCAGACTGTT |
| | | CTT | | | ACT |
| 255 | E51SL17 | ATAAAATCACAGAGGGTGA | 256 | E51SL18 | TATAAAATCACAGAGGGTG |
| | | TGG | | | ATG |
| 255 | E51SL17 | ATAAAATCACAGAGGGTGA | 257 | E51SL19 | AGTTATAAAATCACAGAGG |
| | | TGG | | | GTG |
| 255 | E51SL17 | ATAAAATCACAGAGGGTGA | 258 | E51SL20 | TGATCAAGTTATAAAATCA |
| | | TGG | | | CAG |
| 255 | E51SL17 | ATAAAATCACAGAGGGTGA | 259 | E51SL21 | TTGATCAAGTTATAAAATC |
| | | TGG | | | ACA |
| 255 | E51SL17 | ATAAAATCACAGAGGGTGA | 260 | E51SL22 | GGGCTTGGACAGAACTTAC |
| | | TGG | | | CGA |
| 255 | E51SL17 | ATAAAATCACAGAGGGTGA | 261 | E51SL23 | CTCTGGCAGATTTCAACCG |
| | | TGG | | | GGC |
| 255 | E51SL17 | ATAAAATCACAGAGGGTGA | 262 | E51SL24 | ACCTGCTCTGGCAGATTTC |
| | | TGG | | | AAC |
| 255 | E51SL17 | ATAAAATCACAGAGGGTGA | 263 | E51SL25 | TACCTGCTCTGGCAGATTT |
| | | TGG | | | CAA |
| 255 | E51SL17 | ATAAAATCACAGAGGGTGA | 264 | E51SL26 | CTTGATGTTGGAGGTACCT |
| | | TGG | | | GCT |
| 255 | E51SL17 | ATAAAATCACAGAGGGTGA | 265 | E51SL27 | AATGCCATCTTCCTTGATG |
| | | TGG | | | TTG |
| 255 | E51SL17 | ATAAAATCACAGAGGGTGA | 266 | E51SL28 | AGAAATGCCATCTTCCTTG |
| | | TGG | | | ATG |
| 255 | E51SL17 | ATAAAATCACAGAGGGTGA | 267 | E51SL29 | GGTGACACAACCTGTGGTT |
| | | TGG | | | ACT |
| 255 | E51SL17 | ATAAAATCACAGAGGGTGA | 268 | E51SL30 | TGTTACTCTGGTGACACAA |
| | | TGG | | | CCT |
| 255 | E51SL17 | ATAAAATCACAGAGGGTGA | 269 | E51SL31 | AGCTCCTACTCAGACTGTT |
| | | TGG | | | ACT |
| 256 | E51SL18 | TATAAAATCACAGAGGGTG | 257 | E51SL19 | AGTTATAAAATCACAGAGG |
| | | ATG | | | GTG |
| 256 | E51SL18 | TATAAAATCACAGAGGGTG | 258 | E51SL20 | TGATCAAGTTATAAAATCA |
| | | ATG | | | CAG |
| 256 | E51SL18 | TATAAAATCACAGAGGGTG | 259 | E51SL21 | TTGATCAAGTTATAAAATC |
| | | ATG | | | ACA |
| 256 | E51SL18 | TATAAAATCACAGAGGGTG | 260 | E51SL22 | GGGCTTGGACAGAACTTAC |
| | | ATG | | | CGA |
| 256 | E51SL18 | TATAAAATCACAGAGGGTG | 261 | E51SL23 | CTCTGGCAGATTTCAACCG |
| | | ATG | | | GGC |
| 256 | E51SL18 | TATAAAATCACAGAGGGTG | 262 | E51SL24 | ACCTGCTCTGGCAGATTTC |
| | | ATG | | | AAC |
| 256 | E51SL18 | TATAAAATCACAGAGGGTG | 263 | E51SL25 | TACCTGCTCTGGCAGATTT |
| | | ATG | | | CAA |
| 256 | E51SL18 | TATAAAATCACAGAGGGTG | 264 | E51SL26 | CTTGATGTTGGAGGTACCT |
| | | ATG | | | GCT |
| 256 | E51SL18 | TATAAAATCACAGAGGGTG | 265 | E51SL27 | AATGCCATCTTCCTTGATG |
| | | ATG | | | TTG |
| 256 | E51SL18 | TATAAAATCACAGAGGGTG | 266 | E51SL28 | AGAAATGCCATCTTCCTTG |
| | | ATG | | | ATG |
| 256 | E51SL18 | TATAAAATCACAGAGGGTG | 267 | E51SL29 | GGTGACACAACCTGTGGTT |
| | | ATG | | | ACT |
| 256 | E51SL18 | TATAAAATCACAGAGGGTG | 268 | E51SL30 | TGTTACTCTGGTGACACAA |
| | | ATG | | | CCT |
| 256 | E51SL18 | TATAAAATCACAGAGGGTG | 269 | E51SL31 | AGCTCCTACTCAGACTGTT |
| | | ATG | | | ACT |
| 257 | E51SL19 | AGTTATAAAATCACAGAGG | 258 | E51SL20 | TGATCAAGTTATAAAATCA |
| | | GTG | | | CAG |
| 257 | E51SL19 | AGTTATAAAATCACAGAGG | 259 | E51SL21 | TTGATCAAGTTATAAAATC |
| | | GTG | | | ACA |
| 257 | E51SL19 | AGTTATAAAATCACAGAGG | 260 | E51SL22 | GGGCTTGGACAGAACTTAC |
| | | GTG | | | CGA |
| 257 | E51SL19 | AGTTATAAAATCACAGAGG | 261 | E51SL23 | CTCTGGCAGATTTCAACCG |
| | | GTG | | | GGC |
| 257 | E51SL19 | AGTTATAAAATCACAGAGG | 262 | E51SL24 | ACCTGCTCTGGCAGATTTC |
| | | GTG | | | AAC |
| 257 | E51SL19 | AGTTATAAAATCACAGAGG | 263 | E51SL25 | TACCTGCTCTGGCAGATTT |
| | | GTG | | | CAA |
| 257 | E51SL19 | AGTTATAAAATCACAGAGG | 264 | E51SL26 | CTTGATGTTGGAGGTACCT |
| | | GTG | | | GCT |
| 257 | E51SL19 | AGTTATAAAATCACAGAGG | 265 | E51SL27 | AATGCCATCTTCCTTGATG |
| | | GTG | | | TTG |
| 257 | E51SL19 | AGTTATAAAATCACAGAGG | 266 | E51SL28 | AGAAATGCCATCTTCCTTG |
| | | GTG | | | ATG |
| 257 | E51SL19 | AGTTATAAAATCACAGAGG | 267 | E51SL29 | GGTGACACAACCTGTGGTT |
| | | GTG | | | ACT |
| 257 | E51SL19 | AGTTATAAAATCACAGAGG | 268 | E51SL30 | TGTTACTCTGGTGACACAA |
| | | GTG | | | CCT |
| 257 | E51SL19 | AGTTATAAAATCACAGAGG | 269 | E51SL31 | AGCTCCTACTCAGACTGTT |
| | | GTG | | | ACT |
| 258 | E51SL20 | TGATCAAGTTATAAAATCA | 259 | E51SL21 | TTGATCAAGTTATAAAATC |
| | | CAG | | | ACA |
| 258 | E51SL20 | TGATCAAGTTATAAAATCA | 260 | E51SL22 | GGGCTTGGACAGAACTTAC |
| | | CAG | | | CGA |
| 258 | E51SL20 | TGATCAAGTTATAAAATCA | 261 | E51SL23 | CTCTGGCAGATTTCAACCG |
| | | CAG | | | GGC |
| 258 | E51SL20 | TGATCAAGTTATAAAATCA | 262 | E51SL24 | ACCTGCTCTGGCAGATTTC |
| | | CAG | | | AAC |
| 258 | E51SL20 | TGATCAAGTTATAAAATCA | 263 | E51SL25 | TACCTGCTCTGGCAGATTT |
| | | CAG | | | CAA |
| 258 | E51SL20 | TGATCAAGTTATAAAATCA | 264 | E51SL26 | CTTGATGTTGGAGGTACCT |
| | | CAG | | | GCT |
| 258 | E51SL20 | TGATCAAGTTATAAAATCA | 265 | E51SL27 | AATGCCATCTTCCTTGATG |
| | | CAG | | | TTG |
| 258 | E51SL20 | TGATCAAGTTATAAAATCA | 266 | E51SL28 | AGAAATGCCATCTTCCTTG |
| | | CAG | | | ATG |
| 258 | E51SL20 | TGATCAAGTTATAAAATCA | 267 | E51SL29 | GGTGACACAACCTGTGGTT |
| | | CAG | | | ACT |
| 258 | E51SL20 | TGATCAAGTTATAAAATCA | 268 | E51SL30 | TGTTACTCTGGTGACACAA |
| | | CAG | | | CCT |
| 258 | E51SL20 | TGATCAAGTTATAAAATCA | 269 | E51SL31 | AGCTCCTACTCAGACTGTT |
| | | CAG | | | ACT |
| 259 | E51SL21 | TTGATCAAGTTATAAAATC | 260 | E51SL22 | GGGCTTGGACAGAACTTAC |
| | | ACA | | | CGA |
| 259 | E51SL21 | TTGATCAAGTTATAAAATC | 261 | E51SL23 | CTCTGGCAGATTTCAACCG |
| | | ACA | | | GGC |
| 259 | E51SL21 | TTGATCAAGTTATAAAATC | 262 | E51SL24 | ACCTGCTCTGGCAGATTTC |
| | | ACA | | | AAC |
| 259 | E51SL21 | TTGATCAAGTTATAAAATC | 263 | E51SL25 | TACCTGCTCTGGCAGATTT |
| | | ACA | | | CAA |
| 259 | E51SL21 | TTGATCAAGTTATAAAATC | 264 | E51SL26 | CTTGATGTTGGAGGTACCT |
| | | ACA | | | GCT |
| 259 | E51SL21 | TTGATCAAGTTATAAAATC | 265 | E51SL27 | AATGCCATCTTCCTTGATG |
| | | ACA | | | TTG |
| 259 | E51SL21 | TTGATCAAGTTATAAAATC | 266 | E51SL28 | AGAAATGCCATCTTCCTTG |
| | | ACA | | | ATG |
| 259 | E51SL21 | TTGATCAAGTTATAAAATC | 267 | E51SL29 | GGTGACACAACCTGTGGTT |
| | | ACA | | | ACT |
| 259 | E51SL21 | TTGATCAAGTTATAAAATC | 268 | E51SL30 | TGTTACTCTGGTGACACAA |
| | | ACA | | | CCT |
| 259 | E51SL21 | TTGATCAAGTTATAAAATC | 269 | E51SL31 | AGCTCCTACTCAGACTGTT |
| | | ACA | | | ACT |
| 260 | E51SL22 | GGGCTTGGACAGAACTTAC | 261 | E51SL23 | CTCTGGCAGATTTCAACCG |
| | | CGA | | | GGC |
| 260 | E51SL22 | GGGCTTGGACAGAACTTAC | 262 | E51SL24 | ACCTGCTCTGGCAGATTTC |
| | | CGA | | | AAC |
| 260 | E51SL22 | GGGCTTGGACAGAACTTAC | 263 | E51SL25 | TACCTGCTCTGGCAGATTT |
| | | CGA | | | CAA |
| 260 | E51SL22 | GGGCTTGGACAGAACTTAC | 264 | E51SL26 | CTTGATGTTGGAGGTACCT |
| | | CGA | | | GCT |
| 260 | E51SL22 | GGGCTTGGACAGAACTTAC | 265 | E51SL27 | AATGCCATCTTCCTTGATG |
| | | CGA | | | TTG |
| 260 | E51SL22 | GGGCTTGGACAGAACTTAC | 266 | E51SL28 | AGAAATGCCATCTTCCTTG |
| | | CGA | | | ATG |
| 260 | E51SL22 | GGGCTTGGACAGAACTTAC | 267 | E51SL29 | GGTGACACAACCTGTGGTT |
| | | CGA | | | ACT |
| 260 | E51SL22 | GGGCTTGGACAGAACTTAC | 268 | E51SL30 | TGTTACTCTGGTGACACAA |
| | | CGA | | | CCT |
| 260 | E51SL22 | GGGCTTGGACAGAACTTAC | 269 | E51SL31 | AGCTCCTACTCAGACTGTT |
| | | CGA | | | ACT |
| 261 | E51SL23 | CTCTGGCAGATTTCAACCG | 262 | E51SL21 | ACCTGCTCTGGCAGATTTC |
| | | GGC | | | AAC |
| 261 | E51SL23 | CTCTGGCAGATTTCAACCG | 263 | E51SL25 | TACCTGCTCTGGCAGATTT |
| | | GGC | | | CAA |
| 261 | E51SL23 | CTCTGGCAGATTTCAACCG | 264 | E51SL26 | CTTGATGTTGGAGGTACCT |
| | | GGC | | | GCT |
| 261 | E51SL23 | CTCTGGCAGATTTCAACCG | 265 | E51SL27 | AATGCCATCTTCCTTGATG |
| | | GGC | | | TTG |
| 261 | E51SL23 | CTCTGGCAGATTTCAACCG | 266 | E51SL28 | AGAAATGCCATCTTCCTTG |
| | | GGC | | | ATG |
| 261 | E51SL23 | CTCTGGCAGATTTCAACCG | 267 | E51SL29 | GGTGACACAACCTGTGGTT |
| | | GGC | | | ACT |
| 261 | E51SL23 | CTCTGGCAGATTTCAACCG | 268 | E51SL30 | TGTTACTCTGGTGACACAA |
| | | GGC | | | CCT |
| 261 | E51SL23 | CTCTGGCAGATTTCAACCG | 269 | E51SL3 | AGCTCCTACTCAGACTGTT |
| | | GGC | | 1 | ACT |
| 262 | E51SL24 | ACCTGCTCTGGCAGATTTC | 263 | E51SL25 | TACCTGCTCTGGCAGATTT |
| | | AAC | | | CAA |
| 262 | E51SL24 | ACCTGCTCTGGCAGATTTC | 264 | E51SL26 | CTTGATGTTGGAGGTACCT |
| | | AAC | | | GCT |
| 262 | E51SL24 | ACCTGCTCTGGCAGATTTC | 265 | E51SL27 | AATGCCATCTTCCTTGATG |
| | | AAC | | | TTG |
| 262 | E51SL24 | ACCTGCTCTGGCAGATTTC | 266 | E51SL28 | AGAAATGCCATCTTCCTTG |
| | | AAC | | | ATG |
| 262 | E51SL24 | ACCTGCTCTGGCAGATTTC | 267 | E51SL29 | GGTGACACAACCTGTGGTT |
| | | AAC | | | ACT |
| 262 | E51SL24 | ACCTGCTCTGGCAGATTTC | 268 | E51SL30 | TGTTACTCTGGTGACACAA |
| | | AAC | | | CCT |
| 262 | E51SL24 | ACCTGCTCTGGCAGATTTC | 269 | E51SL31 | AGCTCCTACTCAGACTGTT |
| | | AAC | | | ACT |
| 263 | E51SL25 | TACCTGCTCTGGCAGATTT | 264 | E51SL26 | CTTGATGTTGGAGGTACCT |
| | | CAA | | | GCT |
| 263 | E51SL25 | TACCTGCTCTGGCAGATTT | 265 | E51SL27 | AATGCCATCTTCCTTGATG |
| | | CAA | | | TTG |
| 263 | E51SL25 | TACCTGCTCTGGCAGATTT | 266 | E51SL28 | AGAAATGCCATCTTCCTTG |
| | | CAA | | | ATG |
| 263 | E51SL25 | TACCTGCTCTGGCAGATTT | 267 | E51SL29 | GGTGACACAACCTGTGGTT |
| | | CAA | | | ACT |
| 263 | E51SL25 | TACCTGCTCTGGCAGATTT | 268 | E51SL30 | TGTTACTCTGGTGACACAA |
| | | CAA | | | CCT |
| 263 | E51SL25 | TACCTGCTCTGGCAGATTT | 269 | E51SL31 | AGCTCCTACTCAGACTGTT |
| | | CAA | | | ACT |
| 264 | E51SL26 | CTTGATGTTGGAGGTACCT | 265 | E51SL27 | AATGCCATCTTCCTTGATG |
| | | GCT | | | TTG |
| 264 | E51SL26 | CTTGATGTTGGAGGTACCT | 266 | E51SL28 | AGAAATGCCATCTTCCTTG |
| | | GCT | | | ATG |
| 264 | E51SL26 | CTTGATGTTGGAGGTACCT | 267 | E51SL29 | GGTGACACAACCTGTGGTT |
| | | GCT | | | ACT |
| 264 | E51SL26 | CTTGATGTTGGAGGTACCT | 268 | E51SL30 | TGTTACTCTGGTGACACAA |
| | | GCT | | | CCT |
| 264 | E51SL26 | CTTGATGTTGGAGGTACCT | 269 | E51SL31 | AGCTCCTACTCAGACTGTT |
| | | GCT | | | ACT |
| 265 | E51SL27 | AATGCCATCTTCCTTGATG | 266 | E51SL28 | AGAAATGCCATCTTCCTTG |
| | | TTG | | | ATG |
| 265 | E51SL27 | AATGCCATCTTCCTTGATG | 267 | E51SL29 | GGTGACACAACCTGTGGTT |
| | | TTG | | | ACT |
| 265 | E51SL27 | AATGCCATCTTCCTTGATG | 268 | E51SL30 | TGTTACTCTGGTGACACAA |
| | | TTG | | | CCT |
| 265 | E51SL27 | AATGCCATCTTCCTTGATG | 269 | E51SL31 | AGCTCCTACTCAGACTGTT |
| | | TTG | | | ACT |
| 266 | E51SL28 | AGAAATGCCATCTTCCTTG | 267 | E51SL29 | GGTGACACAACCTGTGGTT |
| | | ATG | | | ACT |
| 266 | E51SL28 | AGAAATGCCATCTTCCTTG | 268 | E51SL30 | TGTTACTCTGGTGACACAA |
| | | ATG | | | CCT |
| 266 | E51SL28 | AGAAATGCCATCTTCCTTG | 269 | E51SL31 | AGCTCCTACTCAGACTGTT |
| | | ATG | | | ACT |
| 267 | E51SL29 | GGTGACACAACCTGTGGTT | 268 | E51SL30 | TGTTACTCTGGTGACACAA |
| | | ACT | | | CCT |
| 267 | E51SL29 | GGTGACACAACCTGTGGTT | 269 | E51SL31 | AGCTCCTACTCAGACTGTT |
| | | ACT | | | ACT |
| 268 | E51SL30 | TGTTACTCTGGTGACACAA | 269 | E51SL31 | AGCTCCTACTCAGACTGTT |
| | | CCT | | | ACT |

TABLE 2
All Exon 51 guide sequences (human-hg38.12)

| | Guide RNA | | | | | |
|---|---|---|---|---|---|---|
| Seq ID No. | Name or | | | | | |
| of Guide | Guide ID | exon | | | | |
| Sequence | name | id | enzyme | strand | Guide Sequence | pam |
| 11 | E51Sa1 | 51 | SaCas9 | + | TAGTAACCACAGGTTGTGTCAC | CAGAGT |
| 12 | E51Sa2 | 51 | SaCas9 | + | GTTGTGTCACCAGAGTAACAGT | CTGAGT |
| 13 | E51Sa4 | 51 | SaCas9 | − | GAGGGTGATGGTGGGTGACCTT | GAGGAT |
| 14 | E51Sa5 | 51 | SaCas9 | − | TATAAAATCACAGAGGGTGATG | GTGGGT |
| 15 | E51Sa6 | 51 | SaCas9 | − | TTGATCAAGTTATAAAATCACA | GAGGGT |
| 27 | E51SaCas9KKH1 | 51 | SACAS9KKH | + | TCATTTTTTCTCATACCTTCTG | CTTGAT |
| 28 | E51SaCas9KKH2 | 51 | SACAS9KKH | + | TTTTTTCTCATACCTTCTGCTT | GATGAT |
| 29 | E51SaCas9KKH3 | 51 | SACAS9KKH | + | CCTTCTGCTTGATGATCATCTC | GTTGAT |
| 30 | E51SaCas9KKH4 | 51 | SACAS9KKH | + | ATGATCATCTCGTTGATATCCT | CAAGGT |
| 31 | E51SaCas9KKH5 | 51 | SACAS9KKH | + | AAGGTCACCCACCATCACCCTC | TGTGAT |
| 32 | E51SaCas9KKH6 | 51 | SACAS9KKH | + | ATCACCCTCTGTGATTTTATAA | CTTGAT |
| 33 | E51SaCas9KKH7 | 51 | SACAS9KKH | + | ATAACTTGATCAAGCAGAGAAA | GCCAGT |
| 34 | E51SaCas9KKH8 | 51 | SACAS9KKH | + | CTTGATCAAGCAGAGAAAGCCA | GTCGGT |
| 35 | E51SaCas9KKH9 | 51 | SACAS9KKH | + | ATCAAGCAGAGAAAGCCAGTCG | GTAAGT |
| 36 | E51SaCas9KKH10 | 51 | SACAS9KKH | + | CAGTCGGTAAGTTCTGTCCAAG | CCCGGT |
| 37 | E51SaCas9KKH11 | 51 | SACAS9KKH | + | GTAAGTTCTGTCCAAGCCCGGT | TGAAAT |
| 38 | E51SaCas9KKH12 | 51 | SACAS9KKH | + | AGCCCGGTTGAAATCTGCCAGA | GCAGGT |
| 39 | E51SaCas9KKH13 | 51 | SACAS9KKH | + | AGCAGGTACCTCCAACATCAAG | GAAGAT |
| 40 | E51SaCas9KKH14 | 51 | SACAS9KKH | + | CAACATCAAGGAAGATGGCATT | TCTAGT |
| 41 | E51SaCas9KKH15 | 51 | SACAS9KKH | + | AGGAAGATGGCATTTCTAGTTT | GGAGAT |
| 42 | E51SaCas9KKH16 | 51 | SACAS9KKH | + | ATGGCATTTCTAGTTTGGAGAT | GGCAGT |
| 43 | E51SaCas9KKH17 | 51 | SACAS9KKH | + | CTAGTTTGGAGATGGCAGTTTC | CTTAGT |
| 44 | E51SaCas9KKH18 | 51 | SACAS9KKH | + | GATGGCAGTTTCCTTAGTAACC | ACAGGT |
| 45 | E51SaCas9KKH19 | 51 | SACAS9KKH | + | TAGTAACCACAGGTTGTGTCAC | CAGAGT |
| 46 | E51SaCas9KKH20 | 51 | SACAS9KKH | + | CCACAGGTTGTGTCACCAGAGT | AACAGT |
| 47 | E51SaCas9KKH21 | 51 | SACAS9KKH | + | GTTGTGTCACCAGAGTAACAGT | CTGAGT |
| 48 | E51SaCas9KKH22 | 51 | SACAS9KKH | + | GAGTAACAGTCTGAGTAGGAGC | TAAAAT |
| 49 | E51SaCas9KKH23 | 51 | SACAS9KKH | + | TCTGAGTAGGAGCTAAAATATT | TTGGGT |
| 50 | E51SaCas9KKH24 | 51 | SACAS9KKH | − | AGAAGGTATGAGAAAAAATGAT | AAAAGT |
| 51 | E51SaCas9KKH25 | 51 | SACAS9KKH | − | TCAAGCAGAAGGTATGAGAAAA | AATGAT |
| 52 | E51SaCas9KKH26 | 51 | SACAS9KKH | − | TCATCAAGCAGAAGGTATGAGA | AAAAAT |
| 53 | E51SaCas9KKH27 | 51 | SACAS9KKH | − | TCAACGAGATGATCATCAAGCA | GAAGGT |
| 54 | E51SaCas9KKH28 | 51 | SACAS9KKH | − | GTGACCTTGAGGATATCAACGA | GATGAT |
| 55 | E51SaCas9KKH29 | 51 | SACAS9KKH | − | TGGGTGACCTTGAGGATATCAA | CGAGAT |
| 56 | E51SaCas9KKH30 | 51 | SACAS9KKH | − | GAGGGTGATGGTGGGTGACCTT | GAGGAT |
| 57 | E51SaCas9KKH31 | 51 | SACAS9KKH | − | TATAAAATCACAGAGGGTGATG | GTGGGT |
| 58 | E51SaCas9KKH32 | 51 | SACAS9KKH | − | AAGTTATAAAATCACAGAGGGT | GATGGT |
| 59 | E51SaCas9KKH33 | 51 | SACAS9KKH | − | ATCAAGTTATAAAATCACAGAG | GGTGAT |
| 60 | E51SaCas9KKH34 | 51 | SACAS9KKH | − | TTGATCAAGTTATAAAATCACA | GAGGGT |
| 61 | E51SaCas9KKH35 | 51 | SACAS9KKH | − | CTTTCTCTGCTTGATCAAGTTA | TAAAAT |
| 62 | E51SaCas9KKH36 | 51 | SACAS9KKH | − | CCGACTGGCTTTCTCTGCTTGA | TCAAGT |
| 63 | E51SaCas9KKH37 | 51 | SACAS9KKH | − | ACTTACCGACTGGCTTTCTCTG | CTTGAT |
| 64 | E51SaCas9KKH38 | 51 | SACAS9KKH | − | GATGTTGGAGGTACCTGCTCTG | GCAGAT |
| 65 | E51SaCas9KKH39 | 51 | SACAS9KKH | − | AAATGCCATCTTCCTTGATGTT | GGAGGT |
| 66 | E51SaCas9KKH40 | 51 | SACAS9KKH | − | CCAAACTAGAAATGCCATCTTC | CTTGAT |
| 67 | E51SaCas9KKH41 | 51 | SACAS9KKH | − | AGGAAACTGCCATCTCCAAACT | AGAAAT |
| 68 | E51SaCas9KKH42 | 51 | SACAS9KKH | − | CTGTTACTCTGGTGACACAACC | TGTGGT |
| 69 | E51SaCas9KKH43 | 51 | SACAS9KKH | − | TAGCTCCTACTCAGACTGTTAC | TCTGGT |
| 243 | E51Slu1 | 51 | SluCas9 | + | TGATCATCTCGTTGATATCCTC | AAGG |
| 244 | E51Slu2 | 51 | SluCas9 | + | TTGATCAAGCAGAGAAAGCCAG | TCGG |
| 245 | E51Slu3 | 51 | SluCas9 | + | AGTCGGTAAGTTCTGTCCAAGC | CCGG |
| 246 | E51Slu4 | 51 | SluCas9 | + | GCCCGGTTGAAATCTGCCAGAG | CAGG |
| 247 | E51Slu5 | 51 | SluCas9 | + | CAGAGCAGGTACCTCCAACATC | AAGG |
| 248 | E51Slu6 | 51 | SluCas9 | + | GGTACCTCCAACATCAAGGAAG | ATGG |
| 249 | E51Slu7 | 51 | SluCas9 | + | CAAGGAAGATGGCATTTCTAGT | TTGG |
| 250 | E51Slu8 | 51 | SluCas9 | + | AGATGGCATTTCTAGTTTGGAG | ATGG |
| 251 | E51Slu9 | 51 | SluCas9 | + | ATGGCAGTTTCCTTAGTAACCA | CAGG |
| 252 | E51Slu10 | 51 | SluCas9 | + | GTCACCAGAGTAACAGTCTGAG | TAGG |
| 253 | E51Slu15 | 51 | SluCas9 | − | CAACGAGATGATCATCAAGCAG | AAGG |
| 254 | E51Slu16 | 51 | SluCas9 | - | GAGGGTGATGGTGGGTGACCTT | GAGG |
| 255 | E51Slu17 | 51 | SluCas9 | - | ATAAAATCACAGAGGGTGATGG | TGGG |
| 256 | E51Slu18 | 51 | SluCas9 | − | TATAAAATCACAGAGGGTGATG | GTGG |
| 257 | E51Slu19 | 51 | SluCas9 | − | AGTTATAAAATCACAGAGGGTG | ATGG |
| 258 | E51Slu20 | 51 | SluCas9 | − | TGATCAAGTTATAAAATCACAG | AGGG |
| 259 | E51Slu21 | 51 | SluCas9 | − | TTGATCAAGTTATAAAATCACA | GAGG |
| 260 | E51Slu22 | 51 | SluCas9 | − | GGGCTTGGACAGAACTTACCGA | CTGG |
| 261 | E51Slu23 | 51 | SluCas9 | − | CTCTGGCAGATTTCAACCGGGC | TTGG |
| 262 | E51Slu24 | 51 | SluCas9 | − | ACCTGCTCTGGCAGATTTCAAC | CGGG |
| 263 | E51Slu25 | 51 | SluCas9 | − | TACCTGCTCTGGCAGATTTCAA | CCGG |
| 264 | E51Slu26 | 51 | SluCas9 | − | CTTGATGTTGGAGGTACCTGCT | CTGG |
| 265 | E51Slu27 | 51 | SluCas9 | − | AATGCCATCTTCCTTGATGTTG | GAGG |
| 266 | E51Slu28 | 51 | SluCas9 | − | AGAAATGCCATCTTCCTTGATG | TTGG |
| 267 | E51Slu29 | 51 | SluCas9 | − | GGTGACACAACCTGTGGTTACT | AAGG |
| 268 | E51Slu30 | 51 | SluCas9 | − | TGTTACTCTGGTGACACAACCT | GTGG |
| 269 | E51Slu31 | 51 | SluCas9 | − | AGCTCCTACTCAGACTGTTACT | CTGG |

### Compositions

[0105] In some embodiments, a composition is provided comprising one or more guide RNAs, or one or more nucleic acids encoding one or more guide RNAs, compri sing or consisting of one or more guide sequence of Table 2 (SEQ ID NOs: 11-15 or 27-69 for SaCas9 and 243-269 for SluCas9). Table 2 provides the endonuclease associated with each guide sequence such that for each guide sequence described herein the type of endonuclease to be paired with the guide (for compositions) or used with the guide (for methods/uses) can be determiined.

[0106] In some embodiments, a composition is provided compri sing one or more guide RNAs, or one or more nucleic acids encoding one or more guide RNAs, wherein the guide RNA comprises at least 17, 18, 19, or 20 contiguous nucleotides of a guide sequence of Table 2, or is at least 70%, at least 75%, at least 80%, at least 85%, or at least 90% identical to a guide sequence comprising at least 17, 18, 19, or 20 nucleotides of a guide sequence of Table 2. In particular embodiments, a composition is provided comprising one or more guide RNAs, or one or more nucleic acids encoding one or more guide RNAs, wherein the guide RNA comprises at least 20 contiguous nucleotides of a guide sequence of Table 2, or is at least 70%, at least 75%, at least 80%, at least 85%, or at least 90% identical to guide sequence compri sing at least 20 nucleotides of a guide sequence of Table 2.

[0107] In some embodiments, a composition is provided comprising two or more guide RNAs, or nucleic acid encoding two or more guide RNAs, wherein each guide RNA comprises a guide sequence of Table 2, or at least 17, 18, 19, or 20 contiguous nucleotides of a guide sequence of Table 2, or is at least 70%, at least 75%, at least 80%, at least 85%, or at least 90% identical to a guide sequence comprising at least 17, 18, 19, or 20 nucleotides of a guide sequence selected from Table 2. In particular embodiments, a composition is provided comprising two or more guide RNAs, or nucleic acid encoding two or more guide RNAs, wherein each guide RNA comprises at least 20 contiguous nucleotides of a guide sequence of Table 2, or is at least 70%, at least 75%, at least 80%, at least 85%, or at least 90% identical to a guide sequence comprising at least 20 nucleotides of a guide sequence selected from Table 2.

[0108] In some embodiments, a composition is provided comprising a pair of guide RNAs, or nucleic acid encoding a pair of guide RNAs, wherein the pair of guide RNAs comprises sequences from any of the pairs disclosed in Tables 1B and 1D. In some embodiments, a composition is provided comprising any of the pairs of guide RNA sequences disclosed in Tables 1B and 1D.

[0109] In some embodiments, a composition is provided comprising one or more nucleic acid molecules, wherein at least one of the molecules comprises nucleic acid encoding: a) a SaCas9 or SluCas9; and b) a first and a second guide RNA comprising a first and a second guide sequence, wherein the first and second guide sequence are selected from any one of the guide sequence pairs of Tables 1B and 1D.

[0110] In some embodiments, a composition is provided comprising two nucleic acid molecules, wherein at least one of the molecules comprises a nucleic acid encoding a first and a second guide RNA comprising a first and a second guide sequence, wherein the first and second guide sequence are selected from any one of the guide sequence pairs of Tables 1B and 1D, optionally wherein the nucleic acid does not comprise a nucleic acid encoding an endonuclease.

[0111] In some embodiments, a composition is provided comprising a pair of guide RNAs, wherein the pair of guide RNAs comprises or consists of any one of the pairs of guide sequences of any one of Tables 1B or 1D for exon 51. In some embodiments, a composition is provided comprising one or more nucleic acid molecules encoding a pair of guide RNAs, wherein the pair of guide RNAs comprises any one of the pairs of guide sequences of any one of Tables 1B or 1D.

[0112] In some embodiments, a composition is provided comprising a pair of guide RNAs or a nucleic acid encoding a pair of guide RNAs, wherein the guide RNAs comprise any one of the following pairs of guide sequences:
[0113] a. SEQ ID NOs: 28 and 57; 31 and 57; 31 and 46; 32 and 69; 33 and 57; 33 and 69; 34 and 57; 36 and 69; 37 and 69; 37 and 46; 39 and 46; 40 and 46; 46 and 35; 46 and 62; 46 and 65; 46 and 67; 47 and 57; 48 and 57; 49 and 57; 51 and 57; 53 and 46; 54 and 46; 55 and 46; 58 and 46; 59 and 46; 60 and 46; 61 and 69; or 69 and 30; or
[0114] b. SEQ ID NOs: 243 and 252; 245 and 252; 252 and 253; 252 and 254; 252 and 256; 252 and 257; 252 and 258; 252 and 262; 252 and 264; 252 and 265; or 252 and 266.

[0115] In some embodiments, a composition is provided comprising: i) an SaCas9-KKH or a nucleic acid encoding a SaCas9-KKH, and ii) a first and a second guide RNA, or a nucleic acid encoding a first and a second guide RNA, wherein the first guide RNA comprises the nucleotide sequence of SEQ ID NO: 31, and wherein the second guide RNA comprises the nucleotide sequence of SEQ ID NO: 57. In some embodiments, a composition is provided comprising: i) an SaCas9-KKH or a nucleic acid encoding a SaCas9-KKH, and ii) a first and a second guide RNA, or a nucleic acid encoding a first and a second guide RNA, wherein the first guide RNA comprises the nucleotide sequence of SEQ ID NO: 33, and wherein the second guide RNA comprises the nucleotide sequence of SEQ ID NO: 57. In some embodiments, a composition is provided comprising: i) a SluCas9 or a nucleic acid encoding a SluCas9, and ii) a first and a second guide RNA, or a nucleic acid encoding a first and a second guide RNA, wherein the first guide RNA comprises the nucleotide sequence of SEQ ID NO: 33, and wherein the second guide RNA comprises the nucleotide sequence of SEQ ID NO: 57.

[0116] In some embodiments, the composition further comprises an endonuclease or a nucleic acid encoding an endonuclease. An exemplary endonuclease for use with each of the guide RNAs or pairs of guide RNAs is provided herein, for example, in Table 2, at column “enzyme,” or in the “Guide ID” name as “Sa” for SaCas9, “SaCas9KKH” for SaCas9, or “SL” for SluCas9.

[0117] In some embodiments, a composition is provided comprising a single nucleic acid molecule comprising a nucleic acid encoding any of the guide RNAs disclosed herein, or any of the pairs of guide RNAs disclosed herein, and optionally a nucleic acid encoding an endonuclease.

[0118] In some embodiments, a composition is provided comprising at least two nucleic acid molecules comprising a nucleic acid encoding any of the guide RNAs disclosed herein, or any of the pairs of guide RNAs disclosed herein, and optionally a nucleic acid encoding an endonuclease, wherein at least one nucleic acid molecule does not comprise a nucleic acid encoding an endonuclease.

[0119] In some embodiments, a composition is provided comprising or consisting of a single nucleic acid molecule comprising: i) a nucleic acid encoding Staphylococcus aureus Cas9 (SaCas9) or Staphylococcus lugdunensis (SluCas9) and at least one, at least two, or at least three guide RNAs; or ii) a nucleic acid encoding Staphylococcus aureus Cas9 (SaCas9) or Staphylococcus lugdunensis (SluCas9) and from one to n guide RNAs, wherein n is no more than the maximum number of guide RNAs that can be expressed from said nucleic acid; or iii) a nucleic acid encoding Staphylococcus aureus Cas9 (SaCas9) or Staphylococcus lugdunensis (SluCas9) and one to three guide RNAs, wherein in each instance, the single nucleic acid molecule comprises a nucleic acid encoding at least one, at least two, or two guide sequence(s) of Table 2. In some embodiments, the single nucleic acid molecule comprises a nucleic acid encoding any one of the following pairs of guide sequences:
[0120] a. SEQ ID NOs: 11 and 12; 11 and 13; 11 and 14; 11 and 15; 12 and 13; 12 and 14; 12 and 15; 13 and 14; 13 and 15; 14 and 15; 27 and 28; 27 and 29; 27 and 30; 27 and 31; 27 and 32; 27 and 33; 27 and 34; 27 and 35; 27 and 36; 27 and 37; 27 and 38; 27 and 39; 27 and 40; 27 and 41; 27 and 42; 27 and 43; 27 and 44; 27 and 45; 27 and 46; 27 and 47; 27 and 48; 27 and 53; 27 and 54; 27 and 55; 27 and 56; 27 and 57; 27 and 58; 27 and 59; 27 and 60; 27 and 61; 27 and 62; 27 and 63; 27 and 64; 27 and 65; 27 and 66; 27 and 67; 27 and 68; 27 and 69; 28 and 29; 28 and 30; 28 and 31; 28 and 32; 28 and 33; 28 and 34; 28 and 35; 28 and 36; 28 and 37; 28 and 38; 28 and 39; 28 and 40; 28 and 41; 28 and 42; 28 and 43; 28 and 44; 28 and 45; 28 and 46; 28 and 47; 28 and 48; 28 and 53; 28 and 54; 28 and 55; 28 and 56; 28 and 57; 28 and 58; 28 and 59; 28 and 60; 28 and 61; 28 and 62; 28 and 63; 28 and 64; 28 and 65; 28 and 66; 28 and 67; 28 and 68; 28 and 69; 29 and 30; 29 and 31; 29 and 32; 29 and 33; 29 and 34; 29 and 35; 29 and 36; 29 and 37; 29 and 38; 29 and 39; 29 and 40; 29 and 41; 29 and 42; 29 and 43; 29 and 44; 29 and 45; 29 and 46; 29 and 47; 29 and 48; 29 and 53; 29 and 54; 29 and 55; 29 and 56; 29 and 57; 29 and 58; 29 and 59; 29 and 60; 29 and 61; 29 and 62; 29 and 63; 29 and 64; 29 and 65; 29 and 66; 29 and 67; 29 and 68; 29 and 69; 30 and 31; 30 and 32; 30 and 33; 30 and 34; 30 and 35; 30 and 36; 30 and 37; 30 and 38; 30 and 39; 30 and 40; 30 and 41; 30 and 42; 30 and 43; 30 and 44; 30 and 45; 30 and 46; 30 and 47; 30 and 48; 30 and 53; 30 and 54; 30 and 55; 30 and 56; 30 and 57; 30 and 58; 30 and 59; 30 and 60; 30 and 61; 30 and 62; 30 and 63; 30 and 64; 30 and 65; 30 and 66; 30 and 67; 30 and 68; 30 and 69; 31 and 32; 31 and 33; 31 and 34; 31 and 35; 31 and 36; 31 and 37; 31 and 38; 31 and 39; 31 and 40; 31 and 41; 31 and 42; 31 and 43; 31 and 44; 31 and 45; 31 and 46; 31 and 47; 31 and 48; 31 and 53; 31 and 54; 31 and 55; 31 and 56; 31 and 57; 31 and 58; 31 and 59; 31 and 60; 31 and 61; 31 and 62; 31 and 63; 31 and 64; 31 and 65; 31 and 66; 31 and 67; 31 and 68; 31 and 69; 32 and 33; 32 and 34; 32 and 35; 32 and 36; 32 and 37; 32 and 38; 32 and 39; 32 and 40; 32 and 41; 32 and 42; 32 and 43; 32 and 44; 32 and 45; 32 and 46; 32 and 47; 32 and 48; 32 and 53; 32 and 54; 32 and 55; 32 and 56; 32 and 57; 32 and 58; 32 and 59; 32 and 60; 32 and 61; 32 and 62; 32 and 63; 32 and 64; 32 and 65; 32 and 66; 32 and 67; 32 and 68; 32 and 69; 33 and 34; 33 and 35; 33 and 36; 33 and 37; 33 and 38; 33 and 39; 33 and 40; 33 and 41; 33 and 42; 33 and 43; 33 and 44; 33 and 45; 33 and 46; 33 and 47; 33 and 48; 33 and 53; 33 and 54; 33 and 55; 33 and 56; 33 and 57; 33 and 58; 33 and 59; 33 and 60; 33 and 61; 33 and 62; 33 and 63; 33 and 64; 33 and 65; 33 and 66; 33 and 67; 33 and 68; 33 and 69; 34 and 35; 34 and 36; 34 and 37; 34 and 38; 34 and 39; 34 and 40; 34 and 41; 34 and 42; 34 and 43; 34 and 44; 34 and 45; 34 and 46; 34 and 47; 34 and 48; 34 and 53; 34 and 54; 34 and 55; 34 and 56; 34 and 57; 34 and 58; 34 and 59; 34 and 60; 34 and 61; 34 and 62; 34 and 63; 34 and 64; 34 and 65; 34 and 66; 34 and 67; 34 and 68; 34 and 69; 35 and 36; 35 and 37; 35 and 38; 35 and 39; 35 and 40; 35 and 41; 35 and 42; 35 and 43; 35 and 44; 35 and 45; 35 and 46; 35 and 47; 35 and 48; 35 and 53; 35 and 54; 35 and 55; 35 and 56; 35 and 57; 35 and 58; 35 and 59; 35 and 60; 35 and 61; 35 and 62; 35 and 63; 35 and 64; 35 and 65; 35 and 66; 35 and 67; 35 and 68; 35 and 69; 36 and 37; 36 and 38; 36 and 39; 36 and 40; 36 and 41; 36 and 42; 36 and 43; 36 and 44; 36 and 45; 36 and 46; 36 and 47; 36 and 48; 36 and 53; 36 and 54; 36 and 55; 36 and 56; 36 and 57; 36 and 58; 36 and 59; 36 and 60; 36 and 61; 36 and 62; 36 and 63; 36 and 64; 36 and 65; 36 and 66; 36 and 67; 36 and 68; 36 and 69; 37 and 38; 37 and 39; 37 and 40; 37 and 41; 37 and 42; 37 and 43; 37 and 44; 37 and 45; 37 and 46; 37 and 47; 37 and 48; 37 and 53; 37 and 54; 37 and 55; 37 and 56; 37 and 57; 37 and 58; 37 and 59; 37 and 60; 37 and 61; 37 and 62; 37 and 63; 37 and 64; 37 and 65; 37 and 66; 37 and 67; 37 and 68; 37 and 69; 38 and 39; 38 and 40; 38 and 41; 38 and 42; 38 and 43; 38 and 44; 38 and 45; 38 and 46; 38 and 47; 38 and 48; 38 and 53; 38 and 54; 38 and 55; 38 and 56; 38 and 57; 38 and 58; 38 and 59; 38 and 60; 38 and 61; 38 and 62; 38 and 63; 38 and 64; 38 and 65; 38 and 66; 38 and 67; 38 and 68; 38 and 69; 39 and 40; 39 and 41; 39 and 42; 39 and 43; 39 and 44; 39 and 45; 39 and 46; 39 and 47; 39 and 48; 39 and 53; 39 and 54; 39 and 55; 39 and 56; 39 and 57; 39 and 58; 39 and 59; 39 and 60; 39 and 61; 39 and 62; 39 and 63; 39 and 64; 39 and 65; 39 and 66; 39 and 67; 39 and 68; 39 and 69; 40 and 41; 40 and 42; 40 and 43; 40 and 44; 40 and 45; 40 and 46; 40 and 47; 40 and 48; 40 and 53; 40 and 54; 40 and 55; 40 and 56; 40 and 57; 40 and 58; 40 and 59; 40 and 60; 40 and 61; 40 and 62; 40 and 63; 40 and 64; 40 and 65; 40 and 66; 40 and 67; 40 and 68; 40 and 69; 41 and 42; 41 and 43; 41 and 44; 41 and 45; 41 and 46; 41 and 47; 41 and 48; 41 and 53; 41 and 54; 41 and 55; 41 and 56; 41 and 57; 41 and 58; 41 and 59; 41 and 60; 41 and 61; 41 and 62; 41 and 63; 41 and 64; 41 and 65; 41 and 66; 41 and 67; 41 and 68; 41 and 69; 42 and 43; 42 and 44; 42 and 45; 42 and 46; 42 and 47; 42 and 48; 42 and 53; 42 and 54; 42 and 55; 42 and 56; 42 and 57; 42 and 58; 42 and 59; 42 and 60; 42 and 61; 42 and 62; 42 and 63; 42 and 64; 42 and 65; 42 and 66; 42 and 67; 42 and 68; 42 and 69; 43 and 44; 43 and 45; 43 and 46; 43 and 47; 43 and 48; 43 and 53; 43 and 54; 43 and 55; 43 and 56; 43 and 57; 43 and 58; 43 and 59; 43 and 60; 43 and 61; 43 and 62; 43 and 63; 43 and 64; 43 and 65; 43 and 66; 43 and 67; 43 and 68; 43 and 69; 44 and 45; 44 and 46; 44 and 47; 44 and 48; 44 and 53; 44 and 54; 44 and 55; 44 and 56; 44 and 57; 44 and 58; 44 and 59; 44 and 60; 44 and 61; 44 and 62; 44 and 63; 44 and 64; 44 and 65; 44 and 66; 44 and 67; 44 and 68; 44 and 69; 45 and 46; 45 and 47; 45 and 48; 45 and 53; 45 and 54; 45 and 55; 45 and 56; 45 and 57; 45 and 58; 45 and 59; 45 and 60; 45 and 61; 45 and 62; 45 and 63; 45 and 64; 45 and 65; 45 and 66; 45 and 67; 45 and 68; 45 and 69; 46 and 47; 46 and 48; 46 and 53; 46 and 54; 46 and 55; 46 and 56; 46 and 57; 46 and 58; 46 and 59; 46 and 60; 46 and 61; 46 and 62; 46 and 63; 46 and 64; 46 and 65; 46 and 66; 46 and 67; 46 and 68; 46 and 69; 47 and 48; 47 and 53; 47 and 54; 47 and 55; 47 and 56; 47 and 57; 47 and 58; 47 and 59; 47 and 60; 47 and 61; 47 and 62; 47 and 63; 47 and 64; 47 and 65; 47 and 66; 47 and 67; 47 and 68; 47 and 69; 48 and 53; 48 and 54; 48 and 55; 48 and 56; 48 and 57; 48 and 58; 48 and 59; 48 and 60; 48 and 61; 48 and 62; 48 and 63; 48 and 64; 48 and 65; 48 and 66; 48 and 67; 48 and 68; 48 and 69; 53 and 54; 53 and 55; 53 and 56; 53 and 57; 53 and 58; 53 and 59; 53 and 60; 53 and 61; 53 and 62; 53 and 63; 53 and 64; 53 and 65; 53 and 66; 53 and 67; 53 and 68; 53 and 69; 54 and 55; 54 and 56; 54 and 57; 54 and 58; 54 and 59; 54 and 60; 54 and 61; 54 and 62; 54 and 63; 54 and 64; 54 and 65; 54 and 66; 54 and 67; 54 and 68; 54 and 69; 55 and 56; 55 and 57; 55 and 58; 55 and 59; 55 and 60; 55 and 61; 55 and 62; 55 and 63; 55 and 64; 55 and 65; 55 and 66; 55 and 67; 55 and 68; 55 and 69; 56 and 57; 56 and 58; 56 and 59; 56 and 60; 56 and 61; 56 and 62; 56 and 63; 56 and 64; 56 and 65; 56 and 66; 56 and 67; 56 and 68; 56 and 69; 57 and 58; 57 and 59; 57 and 60; 57 and 61; 57 and 62; 57 and 63; 57 and 64; 57 and 65; 57 and 66; 57 and 67; 57 and 68; 57 and 69; 58 and 59; 58 and 60; 58 and 61; 58 and 62; 58 and 63; 58 and 64; 58 and 65; 58 and 66; 58 and 67; 58 and 68; 58 and 69; 59 and 60; 59 and 61; 59 and 62; 59 and 63; 59 and 64; 59 and 65; 59 and 66; 59 and 67; 59 and 68; 59 and 69; 60 and 61; 60 and 62; 60 and 63; 60 and 64; 60 and 65; 60 and 66; 60 and 67; 60 and 68; 60 and 69; 61 and 62; 61 and 63; 61 and 64; 61 and 65; 61 and 66; 61 and 67; 61 and 68; 61 and 69; 62 and 63; 62 and 64; 62 and 65; 62 and 66; 62 and 67; 62 and 68; 62 and 69; 63 and 64; 63 and 65; 63 and 66; 63 and 67; 63 and 68; 63 and 69; 64 and 65; 64 and 66; 64 and 67; 64 and 68; 64 and 69; 65 and 66; 65 and 67; 65 and 68; 65 and 69; 66 and 67; 66 and 68; 66 and 69; 67 and 68; 67 and 69; 68 and 69;
[0121] b. SEQ ID NOs: 243 and 244; 243 and 245; 243 and 246; 243 and 247; 243 and 248; 243 and 249; 243 and 250; 243 and 251; 243 and 252; 243 and 253; 243 and 254; 243 and 255; 243 and 256; 243 and 257; 243 and 258; 243 and 259; 243 and 260; 243 and 261; 243 and 262; 243 and 263; 243 and 264; 243 and 265; 243 and 266; 243 and 267; 243 and 268; 243 and 269; 244 and 245; 244 and 246; 244 and 247; 244 and 248; 244 and 249; 244 and 250; 244 and 251; 244 and 252; 244 and 253; 244 and 254; 244 and 255; 244 and 256; 244 and 257; 244 and 258; 244 and 259; 244 and 260; 244 and 261; 244 and 262; 244 and 263; 244 and 264; 244 and 265; 244 and 266; 244 and 267; 244 and 268; 244 and 269; 245 and 246; 245 and 247; 245 and 248; 245 and 249; 245 and 250; 245 and 251; 245 and 252; 245 and 253; 245 and 254; 245 and 255; 245 and 256; 245 and 257; 245 and 258; 245 and 259; 245 and 260; 245 and 261; 245 and 262; 245 and 263; 245 and 264; 245 and 265; 245 and 266; 245 and 267; 245 and 268; 245 and 269; 246 and 247; 246 and 248; 246 and 249; 246 and 250; 246 and 251; 246 and 252; 246 and 253; 246 and 254; 246 and 255; 246 and 256; 246 and 257; 246 and 258; 246 and 259; 246 and 260; 246 and 261; 246 and 262; 246 and 263; 246 and 264; 246 and 265; 246 and 266; 246 and 267; 246 and 268; 246 and 269; 247 and 248; 247 and 249; 247 and 250; 247 and 251; 247 and 252; 247 and 253; 247 and 254; 247 and 255; 247 and 256; 247 and 257; 247 and 258; 247 and 259; 247 and 260; 247 and 261; 247 and 262; 247 and 263; 247 and 264; 247 and 265; 247 and 266; 247 and 267; 247 and 268; 247 and 269; 248 and 249; 248 and 250; 248 and 251; 248 and 252; 248 and 253; 248 and 254; 248 and 255; 248 and 256; 248 and 257; 248 and 258; 248 and 259; 248 and 260; 248 and 261; 248 and 262; 248 and 263; 248 and 264; 248 and 265; 248 and 266; 248 and 267; 248 and 268; 248 and 269; 249 and 250; 249 and 251; 249 and 252; 249 and 253; 249 and 254; 249 and 255; 249 and 256; 249 and 257; 249 and 258; 249 and 259; 249 and 260; 249 and 261; 249 and 262; 249 and 263; 249 and 264; 249 and 265; 249 and 266; 249 and 267; 249 and 268; 249 and 269; 250 and 251; 250 and 252; 250 and 253; 250 and 254; 250 and 255; 250 and 256; 250 and 257; 250 and 258; 250 and 259; 250 and 260; 250 and 261; 250 and 262; 250 and 263; 250 and 264; 250 and 265; 250 and 266; 250 and 267; 250 and 268; 250 and 269; 251 and 252; 251 and 253; 251 and 254; 251 and 255; 251 and 256; 251 and 257; 251 and 258; 251 and 259; 251 and 260; 251 and 261; 251 and 262; 251 and 263; 251 and 264; 251 and 265; 251 and 266; 251 and 267; 251 and 268; 251 and 269; 252 and 253; 252 and 254; 252 and 255; 252 and 256; 252 and 257; 252 and 258; 252 and 259; 252 and 260; 252 and 261; 252 and 262; 252 and 263; 252 and 264; 252 and 265; 252 and 266; 252 and 267; 252 and 268; 252 and 269; 253 and 254; 253 and 255; 253 and 256; 253 and 257; 253 and 258; 253 and 259; 253 and 260; 253 and 261; 253 and 262; 253 and 263; 253 and 264; 253 and 265; 253 and 266; 253 and 267; 253 and 268; 253 and 269; 254 and 255; 254 and 256; 254 and 257; 254 and 258; 254 and 259; 254 and 260; 254 and 261; 254 and 262; 254 and 263; 254 and 264; 254 and 265; 254 and 266; 254 and 267; 254 and 268; 254 and 269; 255 and 256; 255 and 257; 255 and 258; 255 and 259; 255 and 260; 255 and 261; 255 and 262; 255 and 263; 255 and 264; 255 and 265; 255 and 266; 255 and 267; 255 and 268; 255 and 269; 256 and 257; 256 and 258; 256 and 259; 256 and 260; 256 and 261; 256 and 262; 256 and 263; 256 and 264; 256 and 265; 256 and 266; 256 and 267; 256 and 268; 256 and 269; 257 and 258; 257 and 259; 257 and 260; 257 and 261; 257 and 262; 257 and 263; 257 and 264; 257 and 265; 257 and 266; 257 and 267; 257 and 268; 257 and 269; 258 and 259; 258 and 260; 258 and 261; 258 and 262; 258 and 263; 258 and 264; 258 and 265; 258 and 266; 258 and 267; 258 and 268; 258 and 269; 259 and 260; 259 and 261; 259 and 262; 259 and 263; 259 and 264; 259 and 265; 259 and 266; 259 and 267; 259 and 268; 259 and 269; 260 and 261; 260 and 262; 260 and 263; 260 and 264; 260 and 265; 260 and 266; 260 and 267; 260 and 268; 260 and 269; 261 and 262; 261 and 263; 261 and 264; 261 and 265; 261 and 266; 261 and 267; 261 and 268; 261 and 269; 262 and 263; 262 and 264; 262 and 265; 262 and 266; 262 and 267; 262 and 268; 262 and 269; 263 and 264; 263 and 265; 263 and 266; 263 and 267; 263 and 268; 263 and 269; 264 and 265; 264 and 266; 264 and 267; 264 and 268; 264 and 269; 265 and 266; 265 and 267; 265 and 268; 265 and 269; 266 and 267; 266 and 268; 266 and 269; 267 and 268; 267 and 269; 268 and 269;
[0122] c. SEQ ID NOs: 28 and 57; 31 and 57; 31 and 46; 32 and 69; 33 and 57; 33 and 69; 34 and 57; 36 and 69; 37 and 69; 37 and 46; 39 and 46; 40 and 46; 46 and 35; 46 and 62; 46 and 65; 46 and 67; 47 and 57; 48 and 57; 49 and 57; 51 and 57; 53 and 46; 54 and 46; 55 and 46; 58 and 46; 59 and 46; 60 and 46; 61 and 69; or 69 and 30; and
[0123] d. SEQ ID NOs: 243 and 252; 245 and 252; 252 and 253; 252 and 254; 252 and 256; 252 and 257; 252 and 258; 252 and 262; 252 and 264; 252 and 265; or 252 and 266.

[0124] In some embodiments, a composition is provided comprising or consisting of at least two nucleic acid molecules comprising a first nucleic acid encoding Staphylococcus aureus Cas9 (SaCas9) or Staphylococcus lugdunensis (SluCas9) and i) a nucleic acid encoding at least one, at least two, or at least three guide RNAs; or ii) a nucleic acid encoding from one to n guide RNAs, wherein n is no more than the maximum number of guide RNAs that can be expressed from said nucleic acid; or iii) a nucleic acid encoding one to three guide RNAs; and a second nucleic acid that does not encode a SaCas9 or SluCas9, optionally wherein the second nucleic acid comprises any one of i) at least one, at least two, at least three, at least four, at least five, or at least six guide RNAs; or ii) from one to n guide RNAs, wherein n is no more than the maximum number of guide RNAs that can be expressed from said nucleic acid; or iii) from one to six guide RNAs, wherein in each instance, the guide RNAs comprises nucleic acid encoding at least one, at least two, or two guide sequence of Table 2. In some embodiments, at least one of the two nucleic acid molecules comprise nucleic acid encoding any one of the following pairs of guide sequences:
[0125] a. SEQ ID NOs: 11 and 12; 11 and 13; 11 and 14; 11 and 15; 12 and 13; 12 and 14; 12 and 15; 13 and 14; 13 and 15; 14 and 15; 27 and 28; 27 and 29; 27 and 30; 27 and 31; 27 and 32; 27 and 33; 27 and 34; 27 and 35; 27 and 36; 27 and 37; 27 and 38; 27 and 39; 27 and 40; 27 and 41; 27 and 42; 27 and 43; 27 and 44; 27 and 45; 27 and 46; 27 and 47; 27 and 48; 27 and 53; 27 and 54; 27 and 55; 27 and 56; 27 and 57; 27 and 58; 27 and 59; 27 and 60; 27 and 61; 27 and 62; 27 and 63; 27 and 64; 27 and 65; 27 and 66; 27 and 67; 27 and 68; 27 and 69; 28 and 29; 28 and 30; 28 and 31; 28 and 32; 28 and 33; 28 and 34; 28 and 35; 28 and 36; 28 and 37; 28 and 38; 28 and 39; 28 and 40; 28 and 41; 28 and 42; 28 and 43; 28 and 44; 28 and 45; 28 and 46; 28 and 47; 28 and 48; 28 and 53; 28 and 54; 28 and 55; 28 and 56; 28 and 57; 28 and 58; 28 and 59; 28 and 60; 28 and 61; 28 and 62; 28 and 63; 28 and 64; 28 and 65; 28 and 66; 28 and 67; 28 and 68; 28 and 69; 29 and 30; 29 and 31; 29 and 32; 29 and 33; 29 and 34; 29 and 35; 29 and 36; 29 and 37; 29 and 38; 29 and 39; 29 and 40; 29 and 41; 29 and 42; 29 and 43; 29 and 44; 29 and 45; 29 and 46; 29 and 47; 29 and 48; 29 and 53; 29 and 54; 29 and 55; 29 and 56; 29 and 57; 29 and 58; 29 and 59; 29 and 60; 29 and 61; 29 and 62; 29 and 63; 29 and 64; 29 and 65; 29 and 66; 29 and 67; 29 and 68; 29 and 69; 30 and 31; 30 and 32; 30 and 33; 30 and 34; 30 and 35; 30 and 36; 30 and 37; 30 and 38; 30 and 39; 30 and 40; 30 and 41; 30 and 42; 30 and 43; 30 and 44; 30 and 45; 30 and 46; 30 and 47; 30 and 48; 30 and 53; 30 and 54; 30 and 55; 30 and 56; 30 and 57; 30 and 58; 30 and 59; 30 and 60; 30 and 61; 30 and 62; 30 and 63; 30 and 64; 30 and 65; 30 and 66; 30 and 67; 30 and 68; 30 and 69; 31 and 32; 31 and 33; 31 and 34; 31 and 35; 31 and 36; 31 and 37; 31 and 38; 31 and 39; 31 and 40; 31 and 41; 31 and 42; 31 and 43; 31 and 44; 31 and 45; 31 and 46; 31 and 47; 31 and 48; 31 and 53; 31 and 54; 31 and 55; 31 and 56; 31 and 57; 31 and 58; 31 and 59; 31 and 60; 31 and 61; 31 and 62; 31 and 63; 31 and 64; 31 and 65; 31 and 66; 31 and 67; 31 and 68; 31 and 69; 32 and 33; 32 and 34; 32 and 35; 32 and 36; 32 and 37; 32 and 38; 32 and 39; 32 and 40; 32 and 41; 32 and 42; 32 and 43; 32 and 44; 32 and 45; 32 and 46; 32 and 47; 32 and 48; 32 and 53; 32 and 54; 32 and 55; 32 and 56; 32 and 57; 32 and 58; 32 and 59; 32 and 60; 32 and 61; 32 and 62; 32 and 63; 32 and 64; 32 and 65; 32 and 66; 32 and 67; 32 and 68; 32 and 69; 33 and 34; 33 and 35; 33 and 36; 33 and 37; 33 and 38; 33 and 39; 33 and 40; 33 and 41; 33 and 42; 33 and 43; 33 and 44; 33 and 45; 33 and 46; 33 and 47; 33 and 48; 33 and 53; 33 and 54; 33 and 55; 33 and 56; 33 and 57; 33 and 58; 33 and 59; 33 and 60; 33 and 61; 33 and 62; 33 and 63; 33 and 64; 33 and 65; 33 and 66; 33 and 67; 33 and 68; 33 and 69; 34 and 35; 34 and 36; 34 and 37; 34 and 38; 34 and 39; 34 and 40; 34 and 41; 34 and 42; 34 and 43; 34 and 44; 34 and 45; 34 and 46; 34 and 47; 34 and 48; 34 and 53; 34 and 54; 34 and 55; 34 and 56; 34 and 57; 34 and 58; 34 and 59; 34 and 60; 34 and 61; 34 and 62; 34 and 63; 34 and 64; 34 and 65; 34 and 66; 34 and 67; 34 and 68; 34 and 69; 35 and 36; 35 and 37; 35 and 38; 35 and 39; 35 and 40; 35 and 41; 35 and 42; 35 and 43; 35 and 44; 35 and 45; 35 and 46; 35 and 47; 35 and 48; 35 and 53; 35 and 54; 35 and 55; 35 and 56; 35 and 57; 35 and 58; 35 and 59; 35 and 60; 35 and 61; 35 and 62; 35 and 63; 35 and 64; 35 and 65; 35 and 66; 35 and 67; 35 and 68; 35 and 69; 36 and 37; 36 and 38; 36 and 39; 36 and 40; 36 and 41; 36 and 42; 36 and 43; 36 and 44; 36 and 45; 36 and 46; 36 and 47; 36 and 48; 36 and 53; 36 and 54; 36 and 55; 36 and 56; 36 and 57; 36 and 58; 36 and 59; 36 and 60; 36 and 61; 36 and 62; 36 and 63; 36 and 64; 36 and 65; 36 and 66; 36 and 67; 36 and 68; 36 and 69; 37 and 38; 37 and 39; 37 and 40; 37 and 41; 37 and 42; 37 and 43; 37 and 44; 37 and 45; 37 and 46; 37 and 47; 37 and 48; 37 and 53; 37 and 54; 37 and 55; 37 and 56; 37 and 57; 37 and 58; 37 and 59; 37 and 60; 37 and 61; 37 and 62; 37 and 63; 37 and 64; 37 and 65; 37 and 66; 37 and 67; 37 and 68; 37 and 69; 38 and 39; 38 and 40; 38 and 41; 38 and 42; 38 and 43; 38 and 44; 38 and 45; 38 and 46; 38 and 47; 38 and 48; 38 and 53; 38 and 54; 38 and 55; 38 and 56; 38 and 57; 38 and 58; 38 and 59; 38 and 60; 38 and 61; 38 and 62; 38 and 63; 38 and 64; 38 and 65; 38 and 66; 38 and 67; 38 and 68; 38 and 69; 39 and 40; 39 and 41; 39 and 42; 39 and 43; 39 and 44; 39 and 45; 39 and 46; 39 and 47; 39 and 48; 39 and 53; 39 and 54; 39 and 55; 39 and 56; 39 and 57; 39 and 58; 39 and 59; 39 and 60; 39 and 61; 39 and 62; 39 and 63; 39 and 64; 39 and 65; 39 and 66; 39 and 67; 39 and 68; 39 and 69; 40 and 41; 40 and 42; 40 and 43; 40 and 44; 40 and 45; 40 and 46; 40 and 47; 40 and 48; 40 and 53; 40 and 54; 40 and 55; 40 and 56; 40 and 57; 40 and 58; 40 and 59; 40 and 60; 40 and 61; 40 and 62; 40 and 63; 40 and 64; 40 and 65; 40 and 66; 40 and 67; 40 and 68; 40 and 69; 41 and 42; 41 and 43; 41 and 44; 41 and 45; 41 and 46; 41 and 47; 41 and 48; 41 and 53; 41 and 54; 41 and 55; 41 and 56; 41 and 57; 41 and 58; 41 and 59; 41 and 60; 41 and 61; 41 and 62; 41 and 63; 41 and 64; 41 and 65; 41 and 66; 41 and 67; 41 and 68; 41 and 69; 42 and 43; 42 and 44; 42 and 45; 42 and 46; 42 and 47; 42 and 48; 42 and 53; 42 and 54; 42 and 55; 42 and 56; 42 and 57; 42 and 58; 42 and 59; 42 and 60; 42 and 61; 42 and 62; 42 and 63; 42 and 64; 42 and 65; 42 and 66; 42 and 67; 42 and 68; 42 and 69; 43 and 44; 43 and 45; 43 and 46; 43 and 47; 43 and 48; 43 and 53; 43 and 54; 43 and 55; 43 and 56; 43 and 57; 43 and 58; 43 and 59; 43 and 60; 43 and 61; 43 and 62; 43 and 63; 43 and 64; 43 and 65; 43 and 66; 43 and 67; 43 and 68; 43 and 69; 44 and 45; 44 and 46; 44 and 47; 44 and 48; 44 and 53; 44 and 54; 44 and 55; 44 and 56; 44 and 57; 44 and 58; 44 and 59; 44 and 60; 44 and 61; 44 and 62; 44 and 63; 44 and 64; 44 and 65; 44 and 66; 44 and 67; 44 and 68; 44 and 69; 45 and 46; 45 and 47; 45 and 48; 45 and 53; 45 and 54; 45 and 55; 45 and 56; 45 and 57; 45 and 58; 45 and 59; 45 and 60; 45 and 61; 45 and 62; 45 and 63; 45 and 64; 45 and 65; 45 and 66; 45 and 67; 45 and 68; 45 and 69; 46 and 47; 46 and 48; 46 and 53; 46 and 54; 46 and 55; 46 and 56; 46 and 57; 46 and 58; 46 and 59; 46 and 60; 46 and 61; 46 and 62; 46 and 63; 46 and 64; 46 and 65; 46 and 66; 46 and 67; 46 and 68; 46 and 69; 47 and 48; 47 and 53; 47 and 54; 47 and 55; 47 and 56; 47 and 57; 47 and 58; 47 and 59; 47 and 60; 47 and 61; 47 and 62; 47 and 63; 47 and 64; 47 and 65; 47 and 66; 47 and 67; 47 and 68; 47 and 69; 48 and 53; 48 and 54; 48 and 55; 48 and 56; 48 and 57; 48 and 58; 48 and 59; 48 and 60; 48 and 61; 48 and 62; 48 and 63; 48 and 64; 48 and 65; 48 and 66; 48 and 67; 48 and 68; 48 and 69; 53 and 54; 53 and 55; 53 and 56; 53 and 57; 53 and 58; 53 and 59; 53 and 60; 53 and 61; 53 and 62; 53 and 63; 53 and 64; 53 and 65; 53 and 66; 53 and 67; 53 and 68; 53 and 69; 54 and 55; 54 and 56; 54 and 57; 54 and 58; 54 and 59; 54 and 60; 54 and 61; 54 and 62; 54 and 63; 54 and 64; 54 and 65; 54 and 66; 54 and 67; 54 and 68; 54 and 69; 55 and 56; 55 and 57; 55 and 58; 55 and 59; 55 and 60; 55 and 61; 55 and 62; 55 and 63; 55 and 64; 55 and 65; 55 and 66; 55 and 67; 55 and 68; 55 and 69; 56 and 57; 56 and 58; 56 and 59; 56 and 60; 56 and 61; 56 and 62; 56 and 63; 56 and 64; 56 and 65; 56 and 66; 56 and 67; 56 and 68; 56 and 69; 57 and 58; 57 and 59; 57 and 60; 57 and 61; 57 and 62; 57 and 63; 57 and 64; 57 and 65; 57 and 66; 57 and 67; 57 and 68; 57 and 69; 58 and 59; 58 and 60; 58 and 61; 58 and 62; 58 and 63; 58 and 64; 58 and 65; 58 and 66; 58 and 67; 58 and 68; 58 and 69; 59 and 60; 59 and 61; 59 and 62; 59 and 63; 59 and 64; 59 and 65; 59 and 66; 59 and 67; 59 and 68; 59 and 69; 60 and 61; 60 and 62; 60 and 63; 60 and 64; 60 and 65; 60 and 66; 60 and 67; 60 and 68; 60 and 69; 61 and 62; 61 and 63; 61 and 64; 61 and 65; 61 and 66; 61 and 67; 61 and 68; 61 and 69; 62 and 63; 62 and 64; 62 and 65; 62 and 66; 62 and 67; 62 and 68; 62 and 69; 63 and 64; 63 and 65; 63 and 66; 63 and 67; 63 and 68; 63 and 69; 64 and 65; 64 and 66; 64 and 67; 64 and 68; 64 and 69; 65 and 66; 65 and 67; 65 and 68; 65 and 69; 66 and 67; 66 and 68; 66 and 69; 67 and 68; 67 and 69; 68 and 69;
[0126] b. SEQ ID NOs: 243 and 244; 243 and 245; 243 and 246; 243 and 247; 243 and 248; 243 and 249; 243 and 250; 243 and 251; 243 and 252; 243 and 253; 243 and 254; 243 and 255; 243 and 256; 243 and 257; 243 and 258; 243 and 259; 243 and 260; 243 and 261; 243 and 262; 243 and 263; 243 and 264; 243 and 265; 243 and 266; 243 and 267; 243 and 268; 243 and 269; 244 and 245; 244 and 246; 244 and 247; 244 and 248; 244 and 249; 244 and 250; 244 and 251; 244 and 252; 244 and 253; 244 and 254; 244 and 255; 244 and 256; 244 and 257; 244 and 258; 244 and 259; 244 and 260; 244 and 261; 244 and 262; 244 and 263; 244 and 264; 244 and 265; 244 and 266; 244 and 267; 244 and 268; 244 and 269; 245 and 246; 245 and 247; 245 and 248; 245 and 249; 245 and 250; 245 and 251; 245 and 252; 245 and 253; 245 and 254; 245 and 255; 245 and 256; 245 and 257; 245 and 258; 245 and 259; 245 and 260; 245 and 261; 245 and 262; 245 and 263; 245 and 264; 245 and 265; 245 and 266; 245 and 267; 245 and 268; 245 and 269; 246 and 247; 246 and 248; 246 and 249; 246 and 250; 246 and 251; 246 and 252; 246 and 253; 246 and 254; 246 and 255; 246 and 256; 246 and 257; 246 and 258; 246 and 259; 246 and 260; 246 and 261; 246 and 262; 246 and 263; 246 and 264; 246 and 265; 246 and 266; 246 and 267; 246 and 268; 246 and 269; 247 and 248; 247 and 249; 247 and 250; 247 and 251; 247 and 252; 247 and 253; 247 and 254; 247 and 255; 247 and 256; 247 and 257; 247 and 258; 247 and 259; 247 and 260; 247 and 261; 247 and 262; 247 and 263; 247 and 264; 247 and 265; 247 and 266; 247 and 267; 247 and 268; 247 and 269; 248 and 249; 248 and 250; 248 and 251; 248 and 252; 248 and 253; 248 and 254; 248 and 255; 248 and 256; 248 and 257; 248 and 258; 248 and 259; 248 and 260; 248 and 261; 248 and 262; 248 and 263; 248 and 264; 248 and 265; 248 and 266; 248 and 267; 248 and 268; 248 and 269; 249 and 250; 249 and 251; 249 and 252; 249 and 253; 249 and 254; 249 and 255; 249 and 256; 249 and 257; 249 and 258; 249 and 259; 249 and 260; 249 and 261; 249 and 262; 249 and 263; 249 and 264; 249 and 265; 249 and 266; 249 and 267; 249 and 268; 249 and 269; 250 and 251; 250 and 252; 250 and 253; 250 and 254; 250 and 255; 250 and 256; 250 and 257; 250 and 258; 250 and 259; 250 and 260; 250 and 261; 250 and 262; 250 and 263; 250 and 264; 250 and 265; 250 and 266; 250 and 267; 250 and 268; 250 and 269; 251 and 252; 251 and 253; 251 and 254; 251 and 255; 251 and 256; 251 and 257; 251 and 258; 251 and 259; 251 and 260; 251 and 261; 251 and 262; 251 and 263; 251 and 264; 251 and 265; 251 and 266; 251 and 267; 251 and 268; 251 and 269; 252 and 253; 252 and 254; 252 and 255; 252 and 256; 252 and 257; 252 and 258; 252 and 259; 252 and 260; 252 and 261; 252 and 262; 252 and 263; 252 and 264; 252 and 265; 252 and 266; 252 and 267; 252 and 268; 252 and 269; 253 and 254; 253 and 255; 253 and 256; 253 and 257; 253 and 258; 253 and 259; 253 and 260; 253 and 261; 253 and 262; 253 and 263; 253 and 264; 253 and 265; 253 and 266; 253 and 267; 253 and 268; 253 and 269; 254 and 255; 254 and 256; 254 and 257; 254 and 258; 254 and 259; 254 and 260; 254 and 261; 254 and 262; 254 and 263; 254 and 264; 254 and 265; 254 and 266; 254 and 267; 254 and 268; 254 and 269; 255 and 256; 255 and 257; 255 and 258; 255 and 259; 255 and 260; 255 and 261; 255 and 262; 255 and 263; 255 and 264; 255 and 265; 255 and 266; 255 and 267; 255 and 268; 255 and 269; 256 and 257; 256 and 258; 256 and 259; 256 and 260; 256 and 261; 256 and 262; 256 and 263; 256 and 264; 256 and 265; 256 and 266; 256 and 267; 256 and 268; 256 and 269; 257 and 258; 257 and 259; 257 and 260; 257 and 261; 257 and 262; 257 and 263; 257 and 264; 257 and 265; 257 and 266; 257 and 267; 257 and 268; 257 and 269; 258 and 259; 258 and 260; 258 and 261; 258 and 262; 258 and 263; 258 and 264; 258 and 265; 258 and 266; 258 and 267; 258 and 268; 258 and 269; 259 and 260; 259 and 261; 259 and 262; 259 and 263; 259 and 264; 259 and 265; 259 and 266; 259 and 267; 259 and 268; 259 and 269; 260 and 261; 260 and 262; 260 and 263; 260 and 264; 260 and 265; 260 and 266; 260 and 267; 260 and 268; 260 and 269; 261 and 262; 261 and 263; 261 and 264; 261 and 265; 261 and 266; 261 and 267; 261 and 268; 261 and 269; 262 and 263; 262 and 264; 262 and 265; 262 and 266; 262 and 267; 262 and 268; 262 and 269; 263 and 264; 263 and 265; 263 and 266; 263 and 267; 263 and 268; 263 and 269; 264 and 265; 264 and 266; 264 and 267; 264 and 268; 264 and 269; 265 and 266; 265 and 267; 265 and 268; 265 and 269; 266 and 267; 266 and 268; 266 and 269; 267 and 268; 267 and 269; 268 and 269;
[0127] c. SEQ ID NOs: 28 and 57; 31 and 57; 31 and 46; 32 and 69; 33 and 57; 33 and 69; 34 and 57; 36 and 69; 37 and 69; 37 and 46; 39 and 46; 40 and 46; 46 and 35; 46 and 62; 46 and 65; 46 and 67; 47 and 57; 48 and 57; 49 and 57; 51 and 57; 53 and 46; 54 and 46; 55 and 46; 58 and 46; 59 and 46; 60 and 46; 61 and 69; or 69 and 30; and
[0128] d. SEQ ID NOs: 243 and 252; 245 and 252; 252 and 253; 252 and 254; 252 and 256; 252 and 257; 252 and 258; 252 and 262; 252 and 264; 252 and 265; or 252 and 266.

[0129] In some embodiments, the disclosure provides for one or more nucleic acid molecules encoding a pair of guide RNAs comprising a first guide RNA and a second guide RNA. In some embodiments, the guide RNAs are for use with an SaCas9 endonuclease. In some embodiments, the one or more nucleic acid molecules also encode for an SaCas9 endonuclease. In some embodiments, the one or more nucleic acid molecules are in a composition further comprising an SaCas9 endonuclease. In some embodiments, the first guide RNA comprises the sequence of SEQ ID NOs: 28 and the second guide RNA comprises the sequence of SEQ ID NO: 57. In some embodiments, the first guide RNA comprises the sequence of SEQ ID NOs: 31 and the second guide RNA comprises the sequence of SEQ ID NO: 57. In some embodiments, the first guide RNA comprises the sequence of SEQ ID NOs: 31 and the second guide RNA comprises the sequence of SEQ ID NO: 46. In some embodiments, the first guide RNA comprises the sequence of SEQ ID NOs: 32 and the second guide RNA comprises the sequence of SEQ ID NO: 69. In some embodiments, the first guide RNA comprises the sequence of SEQ ID NOs: 33 and the second guide RNA comprises the sequence of SEQ ID NO: 57. In some embodiments, the first guide RNA comprises the sequence of SEQ ID NOs: 33 and the second guide RNA comprises the sequence of SEQ ID NO: 69. In some embodiments, the first guide RNA comprises the sequence of SEQ ID NOs: 34 and the second guide RNA comprises the sequence of SEQ ID NO: 57. In some embodiments, the first guide RNA comprises the sequence of SEQ ID NOs: 36 and the second guide RNA comprises the sequence of SEQ ID NO: 69. In some embodiments, the first guide RNA comprises the sequence of SEQ ID NOs: 37 and the second guide RNA comprises the sequence of SEQ ID NO: 69. In some embodiments, the first guide RNA comprises the sequence of SEQ ID NOs: 37 and the second guide RNA comprises the sequence of SEQ ID NO: 46. In some embodiments, the first guide RNA comprises the sequence of SEQ ID NOs: 39 and the second guide RNA comprises the sequence of SEQ ID NO: 46. In some embodiments, the first guide RNA comprises the sequence of SEQ ID NOs: 39 and the second guide RNA comprises the sequence of SEQ ID NO: 46. In some embodiments, the first guide RNA comprises the sequence of SEQ ID NOs: 40 and the second guide RNA comprises the sequence of SEQ ID NO: 46. In some embodiments, the first guide RNA comprises the sequence of SEQ ID NOs: 46 and the second guide RNA comprises the sequence of SEQ ID NO: 35. In some embodiments, the first guide RNA comprises the sequence of SEQ ID NOs: 46 and the second guide RNA comprises the sequence of SEQ ID NO: 62. In some embodiments, the first guide RNA comprises the sequence of SEQ ID NOs: 46 and the second guide RNA comprises the sequence of SEQ ID NO: 65. In some embodiments, the first guide RNA comprises the sequence of SEQ ID NOs: 46 and the second guide RNA comprises the sequence of SEQ ID NO: 67. In some embodiments, the first guide RNA comprises the sequence of SEQ ID NOs: 47 and the second guide RNA comprises the sequence of SEQ ID NO: 57. In some embodiments, the first guide RNA comprises the sequence of SEQ ID NOs: 48 and the second guide RNA comprises the sequence of SEQ ID NO: 57. In some embodiments, the first guide RNA comprises the sequence of SEQ ID NOs: 49 and the second guide RNA comprises the sequence of SEQ ID NO: 57. In some embodiments, the first guide RNA comprises the sequence of SEQ ID NOs: 51 and the second guide RNA comprises the sequence of SEQ ID NO: 57. In some embodiments, the first guide RNA comprises the sequence of SEQ ID NOs: 53 and the second guide RNA comprises the sequence of SEQ ID NO: 46. In some embodiments, the first guide RNA comprises the sequence of SEQ ID NOs: 28 and the second guide RNA comprises the sequence of SEQ ID NO: 57. In some embodiments, the first guide RNA comprises the sequence of SEQ ID NOs: 54 and the second guide RNA comprises the sequence of SEQ ID NO: 46. In some embodiments, the first guide RNA comprises the sequence of SEQ ID NOs: 55 and the second guide RNA comprises the sequence of SEQ ID NO: 46. In some embodiments, the first guide RNA comprises the sequence of SEQ ID NOs: 58 and the second guide RNA comprises the sequence of SEQ ID NO: 46. In some embodiments, the first guide RNA comprises the sequence of SEQ ID NOs: 59 and the second guide RNA comprises the sequence of SEQ ID NO: 46. In some embodiments, the first guide RNA comprises the sequence of SEQ ID NOs: 60 and the second guide RNA comprises the sequence of SEQ ID NO: 46. In some embodiments, the first guide RNA comprises the sequence of SEQ ID NOs: 61 and the second guide RNA comprises the sequence of SEQ ID NO: 69. In some embodiments, the first guide RNA comprises the sequence of SEQ ID NOs: 69 and the second guide RNA comprises the sequence of SEQ ID NO: 30. In some embodiments the guide RNAs each comprise a scaffold sequence comprising the sequence of SEQ ID NO: 504.

[0130] In some embodiments, the disclosure provides for one or more nucleic acid molecules encoding a pair of guide RNAs comprising a first guide RNA and a second guide RNA. In some embodiments, the guide RNAs are for use with an SluCas9 endonuclease. In some embodiments, the one or more nucleic acid molecules also encode for an SluCas9 endonuclease. In some embodiments, the one or more nucleic acid molecules are in a composition further comprising an SluCas9 endonuclease. In some embodiments, the first guide RNA comprises the sequence of SEQ ID NOs: 243 and the second guide RNA comprises the sequence of SEQ ID NO: 252. In some embodiments, the first guide RNA comprises the sequence of SEQ ID NOs: 245 and the second guide RNA comprises the sequence of SEQ ID NO: 252. In some embodiments, the first guide RNA comprises the sequence of SEQ ID NOs: 252 and the second guide RNA comprises the sequence of SEQ ID NO: 253. In some embodiments, the first guide RNA comprises the sequence of SEQ ID NOs: 252 and the second guide RNA comprises the sequence of SEQ ID NO: 254. In some embodiments, the first guide RNA comprises the sequence of SEQ ID NOs: 252 and the second guide RNA comprises the sequence of SEQ ID NO: 256. In some embodiments, the first guide RNA comprises the sequence of SEQ ID NOs: 252 and the second guide RNA comprises the sequence of SEQ ID NO: 257. In some embodiments, the first guide RNA comprises the sequence of SEQ ID NOs: 252 and the second guide RNA comprises the sequence of SEQ ID NO: 258. In some embodiments, the first guide RNA comprises the sequence of SEQ ID NOs: 252 and the second guide RNA comprises the sequence of SEQ ID NO: 262. In some embodiments, the first guide RNA comprises the sequence of SEQ ID NOs: 252 and the second guide RNA comprises the sequence of SEQ ID NO: 264. In some embodiments, the first guide RNA comprises the sequence of SEQ ID NOs: 252 and the second guide RNA comprises the sequence of SEQ ID NO: 265. In some embodiments, the first guide RNA comprises the sequence of SEQ ID NOs: 252 and the second guide RNA comprises the sequence of SEQ ID NO: 266. In some embodiments the guide RNAs each comprise a scaffold sequence comprising the sequence of SEQ ID NO: 901.

[0131] The disclosure herein may reference a “first and a second spacer” or a “first and a second guide RNA, gRNA, or sgRNA” followed by one or more pairs of specific sequences. It should be noted that the order of the sequences in the pair is not intended to be restricted to the order in which they are presented/described. For example, the phrase “the first sgRNA and the second sgRNA comprise the sequences of SEQ ID NOs: 11 and 15” could mean that the first sgRNA comprises the sequence of SEQ ID NO: 11 and the second sgRNA sequence comprises the sequence of SEQ ID NO: 15, or this phrase could mean that the first sgRNA comprises the sequence of SEQ ID NO: 15 and the second sgRNA sequence comprises the sequence of SEQ ID NO: 11.

[0132] In some embodiments, the first and/or the second nucleic acid, if present, comprises at least two guide RNAs. In some embodiments, the first and/or the second nucleic acid, if present, comprises at least three guide RNAs. In some embodiments, the first and/or the second nucleic acid, if present, comprises at least four guide RNAs. In some embodiments, the first and/or the second nucleic acid, if present, comprises at least five guide RNAs. In some embodiments, the first and/or the second nucleic acid, if present, comprises at least six guide RNAs. In some embodiments, the first nucleic acid encodes an endonuclease and at least one, at least two, or at least three guide RNAs. In some embodiments, the first nucleic acid comprises an endonuclease and from one to n guide RNAs, wherein n is no more than the maximum number of guide RNAs that can be expressed from said nucleic acid. In some embodiments, the first nucleic acid encodes an endonuclease and from one to three guide RNAs. In some embodiments, the first nucleic acid comprises 1, 2, 3, 4, 5, or 6 guide RNAs, but does not encode an endonuclease.

[0133] In some embodiments, the second nucleic acid, if present, encodes at least one, at least two, at least three, at least four, at least five, or at least six guide RNAs. In some embodiments, the second nucleic acid, if present, encodes from one to n guide RNAs, wherein n is no more than the maximum number of guide RNAs that can be expressed from said nucleic acid In some embodiments, the second nucleic acid, if present, encodes from one to six guide RNAs. In some embodiments, the second nucleic acid, if present, encodes 2-10, 2-9, 2-8, 2-7, 2-6, 2-5, 2-4, or 2-3 guide RNAs. In some embodiments, the second nucleic acid, if present, encodes 2, 3, 4, 5, or 6 guide RNAs. In some embodiments, the second nucleic acid comprises 1, 2, 3, 4, 5, or 6 guide RNAs, but does not encode an endonuclease.

[0134] In some embodiments, the disclosure provides for a composition comprising at least two nucleic acid molecules, wherein the first nucleic acid comprises a guide RNA and the second nucleic acid comprises a guide RNA, wherein the guide RNA encoded by the first nucleic acid and the second nucleic acid are the same. In some embodiments, the disclosure provides for a composition comprising at least two nucleic acid molecules, wherein the first nucleic acid comprises a guide RNA and the second nucleic acid comprises a guide RNA, wherein the guide RNA encoded by the first nucleic acid and the second nucleic acid are different. In some embodiments, the disclosure provides for a composition comprising at least two nucleic acid molecules, wherein the first nucleic acid comprises a guide RNA and the second nucleic acid comprises a guide RNA, wherein at least one guide RNA binds to a target sequence within an exon in the DMD gene that is upstream of a premature stop codon, and wherein at least one guide RNA binds to a target sequence within an exon in the DMD gene that is downstream of a premature stop codon. In some embodiments, the disclosure provides for a composition comprising at least two nucleic acid molecules, wherein the first nucleic acid comprises a guide RNA and the second nucleic acid comprises a guide RNA, wherein the same guide RNA is encoded by the nucleic acid of the first and second nucleic acid molecule. In some embodiments, the disclosure provides for a composition comprising at least two nucleic acid molecules, wherein the first nucleic acid comprises a guide RNA and the second nucleic acid comprises a guide RNA, wherein the second nucleic acid molecule encodes a guide RNA that binds to the same target sequence as the guide RNA in the first nucleic acid molecule. In some embodiments, the disclosure provides for a composition comprising at least two nucleic acid molecules, wherein the second nucleic acid molecule encodes at least 2, at least 3, at least 4, at least 5, or at least 6 guide RNAs, wherein the guide RNAs in the second nucleic acid molecule bind to the same target sequence as the guide RNA in the first nucleic acid molecule.

[0135] In some embodiments, the disclosure provides for a composition comprising at least two guide RNAs, i) each guide RNA targets the same genomic target sequence; ii) each guide RNA targets a different target sequence; or iii) at least one guide RNA targets one sequence and at least one guide RNA targets a different sequence.

[0136] In some embodiments, the disclosure provides for a composition comprising a guide RNA that binds to an exon of the DMD gene, wherein the exon is exon 51.

[0137] In some embodiments, the disclosure provides for a composition comprising at least two guide RNAs that bind to an exon of the DMD gene, wherein at least one guide RNA binds to a target sequence within an exon in the DMD gene, and wherein at least one guide RNA binds to a different target sequence within the same exon in the DMD gene.

[0138] In some embodiments, the disclosure provides for a composition comprising at least two guide RNAs, wherein at least one guide RNA binds to a target sequence within an exon that is upstream of a premature stop codon, and wherein at least one guide RNA binds to a target sequence within an exon that is downstream of a premature stop codon.

[0139] In some embodiments, the disclosure provides for a composition comprising at least two guide RNAs, wherein at least one guide RNA binds to a target sequence within an exon in the DMD gene, and wherein at least one guide RNA binds to a different target sequence within the same exon in the DMD gene, wherein when expressed in vitro or in vivo in the presence of an appropriate endonuclease (e.g., SaCas9 or SluCas9), a portion of the exon is excised. In some embodiments, the disclosure provides for a composition comprising at least two guide RNAs, wherein once expressed in vitro or in vivo in the presence of an appropriate endonuclease (e.g., SaCas9 or SluCas9), the endonuclease excises a portion of the exon.

[0140] In some embodiments, the disclosure provides for a composition comprising at least two guide RNAs, wherein once expressed in vitro or in vivo in the presence of an appropriate endonuclease (e.g., SaCas9 or SluCas9), the endonuclease excises a portion of the exon, and wherein the portion of the exon remaining after excision are rejoined with a one nucleotide insertion. In some embodiments, the disclosure provides for a composition comprising at least two guide RNAs, wherein once expressed in vitro or in vivo in the presence of an appropriate endonuclease (e.g., SaCas9 or SluCas9), the endonuclease excises a portion of the exon, wherein the portion of the exon remaining after excision is rejoined without a nucleotide insertion.

[0141] In some embodiments, the disclosure provides for a composition comprising at least two guide RNAs, wherein once expressed in vitro or in vivo in the presence of an appropriate endonuclease (e.g., SaCas9 or SluCas9), the endonuclease excises a portion of a dystrophin gene (e.g., exon). In some embodiments, the portions of the gene remaining after excision are rejoined with a one nucleotide insertion or a two nucleotide insertion. In some embodiments, the portions of the exon remaining after excision are rejoined without any nucleotide insertion. “Precise segmental deletion” or “precise deletion” means that the dual cut process takes out a specific deletion. This precise deletion can lead to exon reframing. In some embodiments, the size of the excised portion is between 5 and 250, 5 and 225, 5 and 200, 5 and 190, 5 and 180, 5 and 170, 5 and 160, 5 and 150, 5 and 125, 5 and 120, 5 and 115, 5 and 110, 5 and 100, 5 and 95, 5 and 90, 5 and 85, 5 and 80, 5 and 75, 5 and 70, 5 and 65, 5 and 60, 5 and 55, 5 and 50, 5 and 45, 5 and 40, 5 and 35, 5 and 30, 5 and 25, 5 and 20, 5 and 15, and 5-10 nucleotides. In some embodiments, the size of excised portion is between 20 and 250, 20 and 225, 20 and 200, 20 and 190, 20 and 180, 20 and 170, 20 and 160, 20 and 150, 20 and 125, 20 and 120, 20 and 115, 20 and 110, 20 and 100, 20 and 95, 20 and 90, 20 and 85, 20 and 80, 20 and 75, 20 and 70, 20 and 65, 20 and 60, 20 and 55, 20 and 50, 20 and 45, 20 and 40, 20 and 35, 20 and 30, and 20 and 25 nucleotides. In some embodiments, the size of excised portion is between 50 and 250, 50 and 225, 50 and 200, 50 and 190, 50 and 180, 50 and 170, 50 and 160, 50 and 150, 50 and 125, 50 and 120, 50 and 115, 50 and 110, and 50 and 100 nucleotides. In some embodiments, the size of excised portion of the exon is between 8 and 167 nucleotides. In particular embodiments, if the target is exon 51 of the dystrophin gene, then the precise deletion facilitates a “3n+1” edit of the dystrophin gene, wherein “n” is any negative whole number (e.g., any negative whole number between −10 and −75). In some embodiments, “n” is −10, −11, −12, −13, −14, −15, −16, −17, −18, −19, −20, −21, −22, −23, −24, −25, −26, −27, −28, −29, −30, −31, −32, −33, −34, −35, −36, −37, −38, −39, −40, −41, −42, −43, −44, −45, −46, −47, −48, −49, −50, −51, −52, −53, −54, −55, −56, −57, −58, −59, −60, −61, −62, −63, −64, −65, −66, −67, −68, −69, −70, −71, −72, −73, −74, −75, −76, −77, −78, −79, or −80. For example, if “n” is −10, a 3n+1 edit would be −30 nucleotides +1 nucleotide, i.e., −29 nucleotides, meaning that the actual excision product would be 29 nucleotides in length. With this in mind, in some embodiments, the actual excision product may be any of the following lengths: 26, 29, 32, 35, 38, 41, 44, 47, 50, 53, 56, 59, 62, 65, 68, 71, 74, 77, 80, 83, 86, 89, 92, 95, 98, 101, 104, 107, 110, 113, 116, 119, 122, 125, 128, 131, 134, 137, 140, 143, 146, 149, 152, 155, 158, 161, 164, 167, 170, 173, 176, 179, 182, 185, 188, 191, 194, 197, 200, 203, 206, 209, 212, 215, or 218 nucleotides in length. In particular embodiments, the excised portion is 92 nucleotides in length. In other embodiments, the excised portion is 188 nucleotides in length. In particular embodiments, the excised portion is 71 nucleotides in length. In other embodiments, the excised portion is 92 nucleotides in length. In other embodiments, the excised portion is 188 nucleotides in length. In other embodiments, the excised portion is 119 nucleotides in length.

[0142] In some embodiments, the disclosure provides for a composition comprising at least two guide RNAs, wherein once expressed in vitro or in vivo in the presence of an appropriate endonuclease (e.g., SaCas9 or SluCas9), the endonuclease excises a portion of the exon, wherein the size of the excised portion of the exon is between 5, 6, 7, 8, 9, 10, 15, or 20 and 250 nucleotides in length. In some embodiments, the disclosure provides for a composition comprising at least two guide RNAs, wherein once expressed in vitro or in vivo in the presence of an appropriate endonuclease (e.g., SaCas9 or SluCas9), the endonuclease excises a portion of the exon, wherein the size of excised portion of the exon is between 150 and 250, 100 and 250, 5 and 250, 5 and 200, 5 and 150, 5 and 100, 5 and 75, 5 and 50, 5 and 25, 5 and 10, 20 and 250, 20 and 200, 20 and 150, 20 and 100, 20 and 75, 20 and 50, 20 and 25, 50 and 250, 50 and 200, 50 and 150, 50 and 100, and 50 and 75 nucleotides.

[0143] In some embodiments, the disclosure provides for a composition comprising at least two guide RNAs, wherein once expressed in vitro or in vivo in the presence of an appropriate endonuclease (e.g., SaCas9 or SluCas9), the endonuclease excises a portion of the exon, wherein the size of excised portion of the exon is between 8 and 167 nucleotides.

[0144] In some embodiments, a guide RNA and a Cas9 are encoded on a single nucleic acid molecule. In some embodiments, the single nucleic acid molecule comprises a nucleic acid encoding a guide RNA and a nucleic acid encoding a SaCas9 or SluCas9. In some embodiments, two guide RNAs and a Cas9 are encoded on a single nucleic acid molecule. In some embodiments, the single nucleic acid molecule comprises a nucleic acid encoding a first guide RNA, a nucleic acid encoding a second guide RNA, and a nucleic acid encoding a SaCas9 or SluCas9. In some embodiments, the spacer sequences of the first and second guide RNAs are identical. In some embodiments, the spacer sequences of the first and second guide RNAs are not identical.

[0145] In some embodiments, a single nucleic acid molecule comprises a nucleic acid encoding a Cas9 and a nucleic acid encoding two guide RNAs, wherein the nucleic acid molecule encodes no more than two guide RNAs

[0146] In some embodiments, the single nucleic acid molecule is a single vector or comprised in a single vector. In some embodiments, the single vector expresses the two guide RNAs and Cas9. In some embodiments, a pair of guide RNAs and a Cas9 are provided on a single vector. In some embodiments, the single vector comprises a nucleic acid encoding a pair of guide RNAs and a nucleic acid encoding a SaCas9 or SluCas9. In some embodiments, two guide RNAs and a Cas9 are encoded on a single vector. In some embodiments, the single vector comprises a nucleic acid encoding a first guide RNA, a nucleic acid encoding a second guide RNA, and a nucleic acid encoding a SaCas9 or SluCas9. In some embodiments, the spacer sequences of the first and second guide RNAs are identical. In some embodiments, the spacer sequences of the first and second guide RNAs are not identical.

[0147] In some embodiments, the first nucleic acid molecule encodes for a Cas9 molecule and also encodes for one or more copies of a first guide RNA and one or more copies of a second guide RNA. In some embodiments, the first nucleic acid molecule encodes for a Cas9 molecule, but does not encode for any guide RNAs. In some embodiments, the second nucleic acid molecule encodes for one or more copies of a first guide RNA and one or more copies of a second guide RNA, wherein the second nucleic acid molecule does not encode for a Cas9 molecule.

[0148] In some embodiments, the disclosure provides for a composition comprising one or more guide sequences, or comprises any of the nucleic acid molecules disclosed herein encoding for one or more guide sequences. In some embodiments, the guide sequence is SEQ ID NO: 11; In some embodiments, the guide sequence is SEQ ID NO: 12; In some embodiments, the guide sequence is SEQ ID NO: 13; In some embodiments, the guide sequence is SEQ ID NO: 14; In some embodiments, the guide sequence is SEQ ID NO: 15; In some embodiments, the guide sequence is SEQ ID NO: 27; In some embodiments, the guide sequence is SEQ ID NO: 28; In some embodiments, the guide sequence is SEQ ID NO: 29; In some embodiments, the guide sequence is SEQ ID NO: 30; In some embodiments, the guide sequence is SEQ ID NO: 31; In some embodiments, the guide sequence is SEQ ID NO: 32; In some embodiments, the guide sequence is SEQ ID NO: 33; In some embodiments, the guide sequence is SEQ ID NO: 34; In some embodiments, the guide sequence is SEQ ID NO: 35; In some embodiments, the guide sequence is SEQ ID NO: 36; In some embodiments, the guide sequence is SEQ ID NO: 37; In some embodiments, the guide sequence is SEQ ID NO: 38; In some embodiments, the guide sequence is SEQ ID NO: 39; In some embodiments, the guide sequence is SEQ ID NO: 40; In some embodiments, the guide sequence is SEQ ID NO: 41; In some embodiments, the guide sequence is SEQ ID NO: 42; In some embodiments, the guide sequence is SEQ ID NO: 43; In some embodiments, the guide sequence is SEQ ID NO: 44; In some embodiments, the guide sequence is SEQ ID NO: 45; In some embodiments, the guide sequence is SEQ ID NO: 46; In some embodiments, the guide sequence is SEQ ID NO: 47; In some embodiments, the guide sequence is SEQ ID NO: 48; In some embodiments, the guide sequence is SEQ ID NO: 49; In some embodiments, the guide sequence is SEQ ID NO: 50; In some embodiments, the guide sequence is SEQ ID NO: 51; In some embodiments, the guide sequence is SEQ ID NO: 52; In some embodiments, the guide sequence is SEQ ID NO: 53; In some embodiments, the guide sequence is SEQ ID NO: 54; In some embodiments, the guide sequence is SEQ ID NO: 55; In some embodiments, the guide sequence is SEQ ID NO: 56; In some embodiments, the guide sequence is SEQ ID NO: 57; In some embodiments, the guide sequence is SEQ ID NO: 58; In some embodiments, the guide sequence is SEQ ID NO: 59; In some embodiments, the guide sequence is SEQ ID NO: 60; In some embodiments, the guide sequence is SEQ ID NO: 61; In some embodiments, the guide sequence is SEQ ID NO: 62; In some embodiments, the guide sequence is SEQ ID NO: 63; In some embodiments, the guide sequence is SEQ ID NO: 64; In some embodiments, the guide sequence is SEQ ID NO: 65; In some embodiments, the guide sequence is SEQ ID NO: 66; In some embodiments, the guide sequence is SEQ ID NO: 67; In some embodiments, the guide sequence is SEQ ID NO: 68; In some embodiments, the guide sequence is SEQ ID NO: 69; In some embodiments, the guide sequence is SEQ ID NO: 243; In some embodiments, the guide sequence is SEQ ID NO: 244; In some embodiments, the guide sequence is SEQ ID NO: 245; In some embodiments, the guide sequence is SEQ ID NO: 246; In some embodiments, the guide sequence is SEQ ID NO: 247; In some embodiments, the guide sequence is SEQ ID NO: 248; In some embodiments, the guide sequence is SEQ ID NO: 249; In some embodiments, the guide sequence is SEQ ID NO: 250; In some embodiments, the guide sequence is SEQ ID NO: 251; In some embodiments, the guide sequence is SEQ ID NO: 252; In some embodiments, the guide sequence is SEQ ID NO: 253; In some embodiments, the guide sequence is SEQ ID NO: 254; In some embodiments, the guide sequence is SEQ ID NO: 255; In some embodiments, the guide sequence is SEQ ID NO: 256; In some embodiments, the guide sequence is SEQ ID NO: 257; In some embodiments, the guide sequence is SEQ ID NO: 258; In some embodiments, the guide sequence is SEQ ID NO: 259; In some embodiments, the guide sequence is SEQ ID NO: 260; In some embodiments, the guide sequence is SEQ ID NO: 261; In some embodiments, the guide sequence is SEQ ID NO: 262; In some embodiments, the guide sequence is SEQ ID NO: 263; In some embodiments, the guide sequence is SEQ ID NO: 264; In some embodiments, the guide sequence is SEQ ID NO: 265; In some embodiments, the guide sequence is SEQ ID NO: 266; In some embodiments, the guide sequence is SEQ ID NO: 267; In some embodiments, the guide sequence is SEQ ID NO: 268; In some embodiments, the guide sequence is SEQ ID NO: 269.

[0149] In some embodiments, a composition is provided comprising: a) one or more nucleic acid molecules encoding a SaCas9 or SluCas9 and b) a pair of guide sequences comprising a first guide sequence and a second guide sequence, wherein the pair of guide sequences is selected from any of the following pairs of guide sequences: SEQ ID NO: 11 and SEQ ID NO: 12; SEQ ID NO: 11 and SEQ ID NO: 13; SEQ ID NO: 11 and SEQ ID NO: 14; SEQ ID NO: 11 and SEQ ID NO: 15; SEQ ID NO: 12 and SEQ ID NO: 13; SEQ ID NO: 12 and SEQ ID NO: 14; SEQ ID NO: 12 and SEQ ID NO: 15; SEQ ID NO: 13 and SEQ ID NO: 14; SEQ ID NO: 13 and SEQ ID NO: 15; SEQ ID NO: 14 and SEQ ID NO: 15; SEQ ID NO: 27 and SEQ ID NO: 28; SEQ ID NO: 27 and SEQ ID NO: 29; SEQ ID NO: 27 and SEQ ID NO: 30; SEQ ID NO: 27 and SEQ ID NO: 31; SEQ ID NO: 27 and SEQ ID NO: 32; SEQ ID NO: 27 and SEQ ID NO: 33; SEQ ID NO: 27 and SEQ ID NO: 34; SEQ ID NO: 27 and SEQ ID NO: 35; SEQ ID NO: 27 and SEQ ID NO: 36; SEQ ID NO: 27 and SEQ ID NO: 37; SEQ ID NO: 27 and SEQ ID NO: 38; SEQ ID NO: 27 and SEQ ID NO: 39; SEQ ID NO: 27 and SEQ ID NO: 40; SEQ ID NO: 27 and SEQ ID NO: 41; SEQ ID NO: 27 and SEQ ID NO: 42; SEQ ID NO: 27 and SEQ ID NO: 43; SEQ ID NO: 27 and SEQ ID NO: 44; SEQ ID NO: 27 and SEQ ID NO: 45; SEQ ID NO: 27 and SEQ ID NO: 46; SEQ ID NO: 27 and SEQ ID NO: 47; SEQ ID NO: 27 and SEQ ID NO: 48; SEQ ID NO: 27 and SEQ ID NO: 53; SEQ ID NO: 27 and SEQ ID NO: 54; SEQ ID NO: 27 and SEQ ID NO: 55; SEQ ID NO: 27 and SEQ ID NO: 56; SEQ ID NO: 27 and SEQ ID NO: 57; SEQ ID NO: 27 and SEQ ID NO: 58; SEQ ID NO: 27 and SEQ ID NO: 59; SEQ ID NO: 27 and SEQ ID NO: 60; SEQ ID NO: 27 and SEQ ID NO: 61; SEQ ID NO: 27 and SEQ ID NO: 62; SEQ ID NO: 27 and SEQ ID NO: 63; SEQ ID NO: 27 and SEQ ID NO: 64; SEQ ID NO: 27 and SEQ ID NO: 65; SEQ ID NO: 27 and SEQ ID NO: 66; SEQ ID NO: 27 and SEQ ID NO: 67; SEQ ID NO: 27 and SEQ ID NO: 68; SEQ ID NO: 27 and SEQ ID NO: 69; SEQ ID NO: 28 and SEQ ID NO: 29; SEQ ID NO: 28 and SEQ ID NO: 30; SEQ ID NO: 28 and SEQ ID NO: 31; SEQ ID NO: 28 and SEQ ID NO: 32; SEQ ID NO: 28 and SEQ ID NO: 33; SEQ ID NO: 28 and SEQ ID NO: 34; SEQ ID NO: 28 and SEQ ID NO: 35; SEQ ID NO: 28 and SEQ ID NO: 36; SEQ ID NO: 28 and SEQ ID NO: 37; SEQ ID NO: 28 and SEQ ID NO: 38; SEQ ID NO: 28 and SEQ ID NO: 39; SEQ ID NO: 28 and SEQ ID NO: 40; SEQ ID NO: 28 and SEQ ID NO: 41; SEQ ID NO: 28 and SEQ ID NO: 42; SEQ ID NO: 28 and SEQ ID NO: 43; SEQ ID NO: 28 and SEQ ID NO: 44; SEQ ID NO: 28 and SEQ ID NO: 45; SEQ ID NO: 28 and SEQ ID NO: 46; SEQ ID NO: 28 and SEQ ID NO: 47; SEQ ID NO: 28 and SEQ ID NO: 48; SEQ ID NO: 28 and SEQ ID NO: 53; SEQ ID NO: 28 and SEQ ID NO: 54; SEQ ID NO: 28 and SEQ ID NO: 55; SEQ ID NO: 28 and SEQ ID NO: 56; SEQ ID NO: 28 and SEQ ID NO: 57; SEQ ID NO: 28 and SEQ ID NO: 58; SEQ ID NO: 28 and SEQ ID NO: 59; SEQ ID NO: 28 and SEQ ID NO: 60; SEQ ID NO: 28 and SEQ ID NO: 61; SEQ ID NO: 28 and SEQ ID NO: 62; SEQ ID NO: 28 and SEQ ID NO: 63; SEQ ID NO: 28 and SEQ ID NO: 64; SEQ ID NO: 28 and SEQ ID NO: 65; SEQ ID NO: 28 and SEQ ID NO: 66; SEQ ID NO: 28 and SEQ ID NO: 67; SEQ ID NO: 28 and SEQ ID NO: 68; SEQ ID NO: 28 and SEQ ID NO: 69; SEQ ID NO: 29 and SEQ ID NO: 30; SEQ ID NO: 29 and SEQ ID NO: 31; SEQ ID NO: 29 and SEQ ID NO: 32; SEQ ID NO: 29 and SEQ ID NO: 33; SEQ ID NO: 29 and SEQ ID NO: 34; SEQ ID NO: 29 and SEQ ID NO: 35; SEQ ID NO: 29 and SEQ ID NO: 36; SEQ ID NO: 29 and SEQ ID NO: 37; SEQ ID NO: 29 and SEQ ID NO: 38; SEQ ID NO: 29 and SEQ ID NO: 39; SEQ ID NO: 29 and SEQ ID NO: 40; SEQ ID NO: 29 and SEQ ID NO: 41; SEQ ID NO: 29 and SEQ ID NO: 42; SEQ ID NO: 29 and SEQ ID NO: 43; SEQ ID NO: 29 and SEQ ID NO: 44; SEQ ID NO: 29 and SEQ ID NO: 45; SEQ ID NO: 29 and SEQ ID NO: 46; SEQ ID NO: 29 and SEQ ID NO: 47; SEQ ID NO: 29 and SEQ ID NO: 48; SEQ ID NO: 29 and SEQ ID NO: 53; SEQ ID NO: 29 and SEQ ID NO: 54; SEQ ID NO: 29 and SEQ ID NO: 55; SEQ ID NO: 29 and SEQ ID NO: 56; SEQ ID NO: 29 and SEQ ID NO: 57; SEQ ID NO: 29 and SEQ ID NO: 58; SEQ ID NO: 29 and SEQ ID NO: 59; SEQ ID NO: 29 and SEQ ID NO: 60; SEQ ID NO: 29 and SEQ ID NO: 61; SEQ ID NO: 29 and SEQ ID NO: 62; SEQ ID NO: 29 and SEQ ID NO: 63; SEQ ID NO: 29 and SEQ ID NO: 64; SEQ ID NO: 29 and SEQ ID NO: 65; SEQ ID NO: 29 and SEQ ID NO: 66; SEQ ID NO: 29 and SEQ ID NO: 67; SEQ ID NO: 29 and SEQ ID NO: 68; SEQ ID NO: 29 and SEQ ID NO: 69; SEQ ID NO: 30 and SEQ ID NO: 31; SEQ ID NO: 30 and SEQ ID NO: 32; SEQ ID NO: 30 and SEQ ID NO: 33; SEQ ID NO: 30 and SEQ ID NO: 34; SEQ ID NO: 30 and SEQ ID NO: 35; SEQ ID NO: 30 and SEQ ID NO: 36; SEQ ID NO: 30 and SEQ ID NO: 37; SEQ ID NO: 30 and SEQ ID NO: 38; SEQ ID NO: 30 and SEQ ID NO: 39; SEQ ID NO: 30 and SEQ ID NO: 40; SEQ ID NO: 30 and SEQ ID NO: 41; SEQ ID NO: 30 and SEQ ID NO: 42; SEQ ID NO: 30 and SEQ ID NO: 43; SEQ ID NO: 30 and SEQ ID NO: 44; SEQ ID NO: 30 and SEQ ID NO: 45; SEQ ID NO: 30 and SEQ ID NO: 46; SEQ ID NO: 30 and SEQ ID NO: 47; SEQ ID NO: 30 and SEQ ID NO: 48; SEQ ID NO: 30 and SEQ ID NO: 53; SEQ ID NO: 30 and SEQ ID NO: 54; SEQ ID NO: 30 and SEQ ID NO: 55; SEQ ID NO: 30 and SEQ ID NO: 56; SEQ ID NO: 30 and SEQ ID NO: 57; SEQ ID NO: 30 and SEQ ID NO: 58; SEQ ID NO: 30 and SEQ ID NO: 59; SEQ ID NO: 30 and SEQ ID NO: 60; SEQ ID NO: 30 and SEQ ID NO: 61; SEQ ID NO: 30 and SEQ ID NO: 62; SEQ ID NO: 30 and SEQ ID NO: 63; SEQ ID NO: 30 and SEQ ID NO: 64; SEQ ID NO: 30 and SEQ ID NO: 65; SEQ ID NO: 30 and SEQ ID NO: 66; SEQ ID NO: 30 and SEQ ID NO: 67; SEQ ID NO: 30 and SEQ ID NO: 68; SEQ ID NO: 30 and SEQ ID NO: 69; SEQ ID NO: 31 and SEQ ID NO: 32; SEQ ID NO: 31 and SEQ ID NO: 33; SEQ ID NO: 31 and SEQ ID NO: 34; SEQ ID NO: 31 and SEQ ID NO: 35; SEQ ID NO: 31 and SEQ ID NO: 36; SEQ ID NO: 31 and SEQ ID NO: 37; SEQ ID NO: 31 and SEQ ID NO: 38; SEQ ID NO: 31 and SEQ ID NO: 39; SEQ ID NO: 31 and SEQ ID NO: 40; SEQ ID NO: 31 and SEQ ID NO: 41; SEQ ID NO: 31 and SEQ ID NO: 42; SEQ ID NO: 31 and SEQ ID NO: 43; SEQ ID NO: 31 and SEQ ID NO: 44; SEQ ID NO: 31 and SEQ ID NO: 45; SEQ ID NO: 31 and SEQ ID NO: 46; SEQ ID NO: 31 and SEQ ID NO: 47; SEQ ID NO: 31 and SEQ ID NO: 48; SEQ ID NO: 31 and SEQ ID NO: 53; SEQ ID NO: 31 and SEQ ID NO: 54; SEQ ID NO: 31 and SEQ ID NO: 55; SEQ ID NO: 31 and SEQ ID NO: 56; SEQ ID NO: 31 and SEQ ID NO: 57; SEQ ID NO: 31 and SEQ ID NO: 58; SEQ ID NO: 31 and SEQ ID NO: 59; SEQ ID NO: 31 and SEQ ID NO: 60; SEQ ID NO: 31 and SEQ ID NO: 61; SEQ ID NO: 31 and SEQ ID NO: 62; SEQ ID NO: 31 and SEQ ID NO: 63; SEQ ID NO: 31 and SEQ ID NO: 64; SEQ ID NO: 31 and SEQ ID NO: 65; SEQ ID NO: 31 and SEQ ID NO: 66; SEQ ID NO: 31 and SEQ ID NO: 67; SEQ ID NO: 31 and SEQ ID NO: 68; SEQ ID NO: 31 and SEQ ID NO: 69; SEQ ID NO: 32 and SEQ ID NO: 33; SEQ ID NO: 32 and SEQ ID NO: 34; SEQ ID NO: 32 and SEQ ID NO: 35; SEQ ID NO: 32 and SEQ ID NO: 36; SEQ ID NO: 32 and SEQ ID NO: 37; SEQ ID NO: 32 and SEQ ID NO: 38; SEQ ID NO: 32 and SEQ ID NO: 39; SEQ ID NO: 32 and SEQ ID NO: 40; SEQ ID NO: 32 and SEQ ID NO: 41; SEQ ID NO: 32 and SEQ ID NO: 42; SEQ ID NO: 32 and SEQ ID NO: 43; SEQ ID NO: 32 and SEQ ID NO: 44; SEQ ID NO: 32 and SEQ ID NO: 45; SEQ ID NO: 32 and SEQ ID NO: 46; SEQ ID NO: 32 and SEQ ID NO: 47; SEQ ID NO: 32 and SEQ ID NO: 48; SEQ ID NO: 32 and SEQ ID NO: 53; SEQ ID NO: 32 and SEQ ID NO: 54; SEQ ID NO: 32 and SEQ ID NO: 55; SEQ ID NO: 32 and SEQ ID NO: 56; SEQ ID NO: 32 and SEQ ID NO: 57; SEQ ID NO: 32 and SEQ ID NO: 58; SEQ ID NO: 32 and SEQ ID NO: 59; SEQ ID NO: 32 and SEQ ID NO: 60; SEQ ID NO: 32 and SEQ ID NO: 61; SEQ ID NO: 32 and SEQ ID NO: 62; SEQ ID NO: 32 and SEQ ID NO: 63; SEQ ID NO: 32 and SEQ ID NO: 64; SEQ ID NO: 32 and SEQ ID NO: 65; SEQ ID NO: 32 and SEQ ID NO: 66; SEQ ID NO: 32 and SEQ ID NO: 67; SEQ ID NO: 32 and SEQ ID NO: 68; SEQ ID NO: 32 and SEQ ID NO: 69; SEQ ID NO: 33 and SEQ ID NO: 34; SEQ ID NO: 33 and SEQ ID NO: 35; SEQ ID NO: 33 and SEQ ID NO: 36; SEQ ID NO: 33 and SEQ ID NO: 37; SEQ ID NO: 33 and SEQ ID NO: 38; SEQ ID NO: 33 and SEQ ID NO: 39; SEQ ID NO: 33 and SEQ ID NO: 40; SEQ ID NO: 33 and SEQ ID NO: 41; SEQ ID NO: 33 and SEQ ID NO: 42; SEQ ID NO: 33 and SEQ ID NO: 43; SEQ ID NO: 33 and SEQ ID NO: 44; SEQ ID NO: 33 and SEQ ID NO: 45; SEQ ID NO: 33 and SEQ ID NO: 46; SEQ ID NO: 33 and SEQ ID NO: 47; SEQ ID NO: 33 and SEQ ID NO: 48; SEQ ID NO: 33 and SEQ ID NO: 53; SEQ ID NO: 33 and SEQ ID NO: 54; SEQ ID NO: 33 and SEQ ID NO: 55; SEQ ID NO: 33 and SEQ ID NO: 56; SEQ ID NO: 33 and SEQ ID NO: 57; SEQ ID NO: 33 and SEQ ID NO: 58; SEQ ID NO: 33 and SEQ ID NO: 59; SEQ ID NO: 33 and SEQ ID NO: 60; SEQ ID NO: 33 and SEQ ID NO: 61; SEQ ID NO: 33 and SEQ ID NO: 62; SEQ ID NO: 33 and SEQ ID NO: 63; SEQ ID NO: 33 and SEQ ID NO: 64; SEQ ID NO: 33 and SEQ ID NO: 65; SEQ ID NO: 33 and SEQ ID NO: 66; SEQ ID NO: 33 and SEQ ID NO: 67; SEQ ID NO: 33 and SEQ ID NO: 68; SEQ ID NO: 33 and SEQ ID NO: 69; SEQ ID NO: 34 and SEQ ID NO: 35; SEQ ID NO: 34 and SEQ ID NO: 36; SEQ ID NO: 34 and SEQ ID NO: 37; SEQ ID NO: 34 and SEQ ID NO: 38; SEQ ID NO: 34 and SEQ ID NO: 39; SEQ ID NO: 34 and SEQ ID NO: 40; SEQ ID NO: 34 and SEQ ID NO: 41; SEQ ID NO: 34 and SEQ ID NO: 42; SEQ ID NO: 34 and SEQ ID NO: 43; SEQ ID NO: 34 and SEQ ID NO: 44; SEQ ID NO: 34 and SEQ ID NO: 45; SEQ ID NO: 34 and SEQ ID NO: 46; SEQ ID NO: 34 and SEQ ID NO: 47; SEQ ID NO: 34 and SEQ ID NO: 48; SEQ ID NO: 34 and SEQ ID NO: 53; SEQ ID NO: 34 and SEQ ID NO: 54; SEQ ID NO: 34 and SEQ ID NO: 55; SEQ ID NO: 34 and SEQ ID NO: 56; SEQ ID NO: 34 and SEQ ID NO: 57; SEQ ID NO: 34 and SEQ ID NO: 58; SEQ ID NO: 34 and SEQ ID NO: 59; SEQ ID NO: 34 and SEQ ID NO: 60; SEQ ID NO: 34 and SEQ ID NO: 61; SEQ ID NO: 34 and SEQ ID NO: 62; SEQ ID NO: 34 and SEQ ID NO: 63; SEQ ID NO: 34 and SEQ ID NO: 64; SEQ ID NO: 34 and SEQ ID NO: 65; SEQ ID NO: 34 and SEQ ID NO: 66; SEQ ID NO: 34 and SEQ ID NO: 67; SEQ ID NO: 34 and SEQ ID NO: 68; SEQ ID NO: 34 and SEQ ID NO: 69; SEQ ID NO: 35 and SEQ ID NO: 36; SEQ ID NO: 35 and SEQ ID NO: 37; SEQ ID NO: 35 and SEQ ID NO: 38; SEQ ID NO: 35 and SEQ ID NO: 39; SEQ ID NO: 35 and SEQ ID NO: 40; SEQ ID NO: 35 and SEQ ID NO: 41; SEQ ID NO: 35 and SEQ ID NO: 42; SEQ ID NO: 35 and SEQ ID NO: 43; SEQ ID NO: 35 and SEQ ID NO: 44; SEQ ID NO: 35 and SEQ ID NO: 45; SEQ ID NO: 35 and SEQ ID NO: 46; SEQ ID NO: 35 and SEQ ID NO: 47; SEQ ID NO: 35 and SEQ ID NO: 48; SEQ ID NO: 35 and SEQ ID NO: 53; SEQ ID NO: 35 and SEQ ID NO: 54; SEQ ID NO: 35 and SEQ ID NO: 55; SEQ ID NO: 35 and SEQ ID NO: 56; SEQ ID NO: 35 and SEQ ID NO: 57; SEQ ID NO: 35 and SEQ ID NO: 58; SEQ ID NO: 35 and SEQ ID NO: 59; SEQ ID NO: 35 and SEQ ID NO: 60; SEQ ID NO: 35 and SEQ ID NO: 61; SEQ ID NO: 35 and SEQ ID NO: 62; SEQ ID NO: 35 and SEQ ID NO: 63; SEQ ID NO: 35 and SEQ ID NO: 64; SEQ ID NO: 35 and SEQ ID NO: 65; SEQ ID NO: 35 and SEQ ID NO: 66; SEQ ID NO: 35 and SEQ ID NO: 67; SEQ ID NO: 35 and SEQ ID NO: 68; SEQ ID NO: 35 and SEQ ID NO: 69; SEQ ID NO: 36 and SEQ ID NO: 37; SEQ ID NO: 36 and SEQ ID NO: 38; SEQ ID NO: 36 and SEQ ID NO: 39; SEQ ID NO: 36 and SEQ ID NO: 40; SEQ ID NO: 36 and SEQ ID NO: 41; SEQ ID NO: 36 and SEQ ID NO: 42; SEQ ID NO: 36 and SEQ ID NO: 43; SEQ ID NO: 36 and SEQ ID NO: 44; SEQ ID NO: 36 and SEQ ID NO: 45; SEQ ID NO: 36 and SEQ ID NO: 46; SEQ ID NO: 36 and SEQ ID NO: 47; SEQ ID NO: 36 and SEQ ID NO: 48; SEQ ID NO: 36 and SEQ ID NO: 53; SEQ ID NO: 36 and SEQ ID NO: 54; SEQ ID NO: 36 and SEQ ID NO: 55; SEQ ID NO: 36 and SEQ ID NO: 56; SEQ ID NO: 36 and SEQ ID NO: 57; SEQ ID NO: 36 and SEQ ID NO: 58; SEQ ID NO: 36 and SEQ ID NO: 59; SEQ ID NO: 36 and SEQ ID NO: 60; SEQ ID NO: 36 and SEQ ID NO: 61; SEQ ID NO: 36 and SEQ ID NO: 62; SEQ ID NO: 36 and SEQ ID NO: 63; SEQ ID NO: 36 and SEQ ID NO: 64; SEQ ID NO: 36 and SEQ ID NO: 65; SEQ ID NO: 36 and SEQ ID NO: 66; SEQ ID NO: 36 and SEQ ID NO: 67; SEQ ID NO: 36 and SEQ ID NO: 68; SEQ ID NO: 36 and SEQ ID NO: 69; SEQ ID NO: 37 and SEQ ID NO: 38; SEQ ID NO: 37 and SEQ ID NO: 39; SEQ ID NO: 37 and SEQ ID NO: 40; SEQ ID NO: 37 and SEQ ID NO: 41; SEQ ID NO: 37 and SEQ ID NO: 42; SEQ ID NO: 37 and SEQ ID NO: 43; SEQ ID NO: 37 and SEQ ID NO: 44; SEQ ID NO: 37 and SEQ ID NO: 45; SEQ ID NO: 37 and SEQ ID NO: 46; SEQ ID NO: 37 and SEQ ID NO: 47; SEQ ID NO: 37 and SEQ ID NO: 48; SEQ ID NO: 37 and SEQ ID NO: 53; SEQ ID NO: 37 and SEQ ID NO: 54; SEQ ID NO: 37 and SEQ ID NO: 55; SEQ ID NO: 37 and SEQ ID NO: 56; SEQ ID NO: 37 and SEQ ID NO: 57; SEQ ID NO: 37 and SEQ ID NO: 58; SEQ ID NO: 37 and SEQ ID NO: 59; SEQ ID NO: 37 and SEQ ID NO: 60; SEQ ID NO: 37 and SEQ ID NO: 61; SEQ ID NO: 37 and SEQ ID NO: 62; SEQ ID NO: 37 and SEQ ID NO: 63; SEQ ID NO: 37 and SEQ ID NO: 64; SEQ ID NO: 37 and SEQ ID NO: 65; SEQ ID NO: 37 and SEQ ID NO: 66; SEQ ID NO: 37 and SEQ ID NO: 67; SEQ ID NO: 37 and SEQ ID NO: 68; SEQ ID NO: 37 and SEQ ID NO: 69; SEQ ID NO: 38 and SEQ ID NO: 39; SEQ ID NO: 38 and SEQ ID NO: 40; SEQ ID NO: 38 and SEQ ID NO: 41; SEQ ID NO: 38 and SEQ ID NO: 42; SEQ ID NO: 38 and SEQ ID NO: 43; SEQ ID NO: 38 and SEQ ID NO: 44; SEQ ID NO: 38 and SEQ ID NO: 45; SEQ ID NO: 38 and SEQ ID NO: 46; SEQ ID NO: 38 and SEQ ID NO: 47; SEQ ID NO: 38 and SEQ ID NO: 48; SEQ ID NO: 38 and SEQ ID NO: 53; SEQ ID NO: 38 and SEQ ID NO: 54; SEQ ID NO: 38 and SEQ ID NO: 55; SEQ ID NO: 38 and SEQ ID NO: 56; SEQ ID NO: 38 and SEQ ID NO: 57; SEQ ID NO: 38 and SEQ ID NO: 58; SEQ ID NO: 38 and SEQ ID NO: 59; SEQ ID NO: 38 and SEQ ID NO: 60; SEQ ID NO: 38 and SEQ ID NO: 61; SEQ ID NO: 38 and SEQ ID NO: 62; SEQ ID NO: 38 and SEQ ID NO: 63; SEQ ID NO: 38 and SEQ ID NO: 64; SEQ ID NO: 38 and SEQ ID NO: 65; SEQ ID NO: 38 and SEQ ID NO: 66; SEQ ID NO: 38 and SEQ ID NO: 67; SEQ ID NO: 38 and SEQ ID NO: 68; SEQ ID NO: 38 and SEQ ID NO: 69; SEQ ID NO: 39 and SEQ ID NO: 40; SEQ ID NO: 39 and SEQ ID NO: 41; SEQ ID NO: 39 and SEQ ID NO: 42; SEQ ID NO: 39 and SEQ ID NO: 43; SEQ ID NO: 39 and SEQ ID NO: 44; SEQ ID NO: 39 and SEQ ID NO: 45; SEQ ID NO: 39 and SEQ ID NO: 46; SEQ ID NO: 39 and SEQ ID NO: 47; SEQ ID NO: 39 and SEQ ID NO: 48; SEQ ID NO: 39 and SEQ ID NO: 53; SEQ ID NO: 39 and SEQ ID NO: 54; SEQ ID NO: 39 and SEQ ID NO: 55; SEQ ID NO: 39 and SEQ ID NO: 56; SEQ ID NO: 39 and SEQ ID NO: 57; SEQ ID NO: 39 and SEQ ID NO: 58; SEQ ID NO: 39 and SEQ ID NO: 59; SEQ ID NO: 39 and SEQ ID NO: 60; SEQ ID NO: 39 and SEQ ID NO: 61; SEQ ID NO: 39 and SEQ ID NO: 62; SEQ ID NO: 39 and SEQ ID NO: 63; SEQ ID NO: 39 and SEQ ID NO: 64; SEQ ID NO: 39 and SEQ ID NO: 65; SEQ ID NO: 39 and SEQ ID NO: 66; SEQ ID NO: 39 and SEQ ID NO: 67; SEQ ID NO: 39 and SEQ ID NO: 68; SEQ ID NO: 39 and SEQ ID NO: 69; SEQ ID NO: 40 and SEQ ID NO: 41; SEQ ID NO: 40 and SEQ ID NO: 42; SEQ ID NO: 40 and SEQ ID NO: 43; SEQ ID NO: 40 and SEQ ID NO: 44; SEQ ID NO: 40 and SEQ ID NO: 45; SEQ ID NO: 40 and SEQ ID NO: 46; SEQ ID NO: 40 and SEQ ID NO: 47; SEQ ID NO: 40 and SEQ ID NO: 48; SEQ ID NO: 40 and SEQ ID NO: 53; SEQ ID NO: 40 and SEQ ID NO: 54; SEQ ID NO: 40 and SEQ ID NO: 55; SEQ ID NO: 40 and SEQ ID NO: 56; SEQ ID NO: 40 and SEQ ID NO: 57; SEQ ID NO: 40 and SEQ ID NO: 58; SEQ ID NO: 40 and SEQ ID NO: 59; SEQ ID NO: 40 and SEQ ID NO: 60; SEQ ID NO: 40 and SEQ ID NO: 61; SEQ ID NO: 40 and SEQ ID NO: 62; SEQ ID NO: 40 and SEQ ID NO: 63; SEQ ID NO: 40 and SEQ ID NO: 64; SEQ ID NO: 40 and SEQ ID NO: 65; SEQ ID NO: 40 and SEQ ID NO: 66; SEQ ID NO: 40 and SEQ ID NO: 67; SEQ ID NO: 40 and SEQ ID NO: 68; SEQ ID NO: 40 and SEQ ID NO: 69; SEQ ID NO: 41 and SEQ ID NO: 42; SEQ ID NO: 41 and SEQ ID NO: 43; SEQ ID NO: 41 and SEQ ID NO: 44; SEQ ID NO: 41 and SEQ ID NO: 45; SEQ ID NO: 41 and SEQ ID NO: 46; SEQ ID NO: 41 and SEQ ID NO: 47; SEQ ID NO: 41 and SEQ ID NO: 48; SEQ ID NO: 41 and SEQ ID NO: 53; SEQ ID NO: 41 and SEQ ID NO: 54; SEQ ID NO: 41 and SEQ ID NO: 55; SEQ ID NO: 41 and SEQ ID NO: 56; SEQ ID NO: 41 and SEQ ID NO: 57; SEQ ID NO: 41 and SEQ ID NO: 58; SEQ ID NO: 41 and SEQ ID NO: 59; SEQ ID NO: 41 and SEQ ID NO: 60; SEQ ID NO: 41 and SEQ ID NO: 61; SEQ ID NO: 41 and SEQ ID NO: 62; SEQ ID NO: 41 and SEQ ID NO: 63; SEQ ID NO: 41 and SEQ ID NO: 64; SEQ ID NO: 41 and SEQ ID NO: 65; SEQ ID NO: 41 and SEQ ID NO: 66; SEQ ID NO: 41 and SEQ ID NO: 67; SEQ ID NO: 41 and SEQ ID NO: 68; SEQ ID NO: 41 and SEQ ID NO: 69; SEQ ID NO: 42 and SEQ ID NO: 43; SEQ ID NO: 42 and SEQ ID NO: 44; SEQ ID NO: 42 and SEQ ID NO: 45; SEQ ID NO: 42 and SEQ ID NO: 46; SEQ ID NO: 42 and SEQ ID NO: 47; SEQ ID NO: 42 and SEQ ID NO: 48; SEQ ID NO: 42 and SEQ ID NO: 53; SEQ ID NO: 42 and SEQ ID NO: 54; SEQ ID NO: 42 and SEQ ID NO: 55; SEQ ID NO: 42 and SEQ ID NO: 56; SEQ ID NO: 42 and SEQ ID NO: 57; SEQ ID NO: 42 and SEQ ID NO: 58; SEQ ID NO: 42 and SEQ ID NO: 59; SEQ ID NO: 42 and SEQ ID NO: 60; SEQ ID NO: 42 and SEQ ID NO: 61; SEQ ID NO: 42 and SEQ ID NO: 62; SEQ ID NO: 42 and SEQ ID NO: 63; SEQ ID NO: 42 and SEQ ID NO: 64; SEQ ID NO: 42 and SEQ ID NO: 65; SEQ ID NO: 42 and SEQ ID NO: 66; SEQ ID NO: 42 and SEQ ID NO: 67; SEQ ID NO: 42 and SEQ ID NO: 68; SEQ ID NO: 42 and SEQ ID NO: 69; SEQ ID NO: 43 and SEQ ID NO: 44; SEQ ID NO: 43 and SEQ ID NO: 45; SEQ ID NO: 43 and SEQ ID NO: 46; SEQ ID NO: 43 and SEQ ID NO: 47; SEQ ID NO: 43 and SEQ ID NO: 48; SEQ ID NO: 43 and SEQ ID NO: 53; SEQ ID NO: 43 and SEQ ID NO: 54; SEQ ID NO: 43 and SEQ ID NO: 55; SEQ ID NO: 43 and SEQ ID NO: 56; SEQ ID NO: 43 and SEQ ID NO: 57; SEQ ID NO: 43 and SEQ ID NO: 58; SEQ ID NO: 43 and SEQ ID NO: 59; SEQ ID NO: 43 and SEQ ID NO: 60; SEQ ID NO: 43 and SEQ ID NO: 61; SEQ ID NO: 43 and SEQ ID NO: 62; SEQ ID NO: 43 and SEQ ID NO: 63; SEQ ID NO: 43 and SEQ ID NO: 64; SEQ ID NO: 43 and SEQ ID NO: 65; SEQ ID NO: 43 and SEQ ID NO: 66; SEQ ID NO: 43 and SEQ ID NO: 67; SEQ ID NO: 43 and SEQ ID NO: 68; SEQ ID NO: 43 and SEQ ID NO: 69; SEQ ID NO: 44 and SEQ ID NO: 45; SEQ ID NO: 44 and SEQ ID NO: 46; SEQ ID NO: 44 and SEQ ID NO: 47; SEQ ID NO: 44 and SEQ ID NO: 48; SEQ ID NO: 44 and SEQ ID NO: 53; SEQ ID NO: 44 and SEQ ID NO: 54; SEQ ID NO: 44 and SEQ ID NO: 55; SEQ ID NO: 44 and SEQ ID NO: 56; SEQ ID NO: 44 and SEQ ID NO: 57; SEQ ID NO: 44 and SEQ ID NO: 58; SEQ ID NO: 44 and SEQ ID NO: 59; SEQ ID NO: 44 and SEQ ID NO: 60; SEQ ID NO: 44 and SEQ ID NO: 61; SEQ ID NO: 44 and SEQ ID NO: 62; SEQ ID NO: 44 and SEQ ID NO: 63; SEQ ID NO: 44 and SEQ ID NO: 64; SEQ ID NO: 44 and SEQ ID NO: 65; SEQ ID NO: 44 and SEQ ID NO: 66; SEQ ID NO: 44 and SEQ ID NO: 67; SEQ ID NO: 44 and SEQ ID NO: 68; SEQ ID NO: 44 and SEQ ID NO: 69; SEQ ID NO: 45 and SEQ ID NO: 46; SEQ ID NO: 45 and SEQ ID NO: 47; SEQ ID NO: 45 and SEQ ID NO: 48; SEQ ID NO: 45 and SEQ ID NO: 53; SEQ ID NO: 45 and SEQ ID NO: 54; SEQ ID NO: 45 and SEQ ID NO: 55; SEQ ID NO: 45 and SEQ ID NO: 56; SEQ ID NO: 45 and SEQ ID NO: 57; SEQ ID NO: 45 and SEQ ID NO: 58; SEQ ID NO: 45 and SEQ ID NO: 59; SEQ ID NO: 45 and SEQ ID NO: 60; SEQ ID NO: 45 and SEQ ID NO: 61; SEQ ID NO: 45 and SEQ ID NO: 62; SEQ ID NO: 45 and SEQ ID NO: 63; SEQ ID NO: 45 and SEQ ID NO: 64; SEQ ID NO: 45 and SEQ ID NO: 65; SEQ ID NO: 45 and SEQ ID NO: 66; SEQ ID NO: 45 and SEQ ID NO: 67; SEQ ID NO: 45 and SEQ ID NO: 68; SEQ ID NO: 45 and SEQ ID NO: 69; SEQ ID NO: 46 and SEQ ID NO: 47; SEQ ID NO: 46 and SEQ ID NO: 48; SEQ ID NO: 46 and SEQ ID NO: 53; SEQ ID NO: 46 and SEQ ID NO: 54; SEQ ID NO: 46 and SEQ ID NO: 55; SEQ ID NO: 46 and SEQ ID NO: 56; SEQ ID NO: 46 and SEQ ID NO: 57; SEQ ID NO: 46 and SEQ ID NO: 58; SEQ ID NO: 46 and SEQ ID NO: 59; SEQ ID NO: 46 and SEQ ID NO: 60; SEQ ID NO: 46 and SEQ ID NO: 61; SEQ ID NO: 46 and SEQ ID NO: 62; SEQ ID NO: 46 and SEQ ID NO: 63; SEQ ID NO: 46 and SEQ ID NO: 64; SEQ ID NO: 46 and SEQ ID NO: 65; SEQ ID NO: 46 and SEQ ID NO: 66; SEQ ID NO: 46 and SEQ ID NO: 67; SEQ ID NO: 46 and SEQ ID NO: 68; SEQ ID NO: 46 and SEQ ID NO: 69; SEQ ID NO: 47 and SEQ ID NO: 48; SEQ ID NO: 47 and SEQ ID NO: 53; SEQ ID NO: 47 and SEQ ID NO: 54; SEQ ID NO: 47 and SEQ ID NO: 55; SEQ ID NO: 47 and SEQ ID NO: 56; SEQ ID NO: 47 and SEQ ID NO: 57; SEQ ID NO: 47 and SEQ ID NO: 58; SEQ ID NO: 47 and SEQ ID NO: 59; SEQ ID NO: 47 and SEQ ID NO: 60; SEQ ID NO: 47 and SEQ ID NO: 61; SEQ ID NO: 47 and SEQ ID NO: 62; SEQ ID NO: 47 and SEQ ID NO: 63; SEQ ID NO: 47 and SEQ ID NO: 64; SEQ ID NO: 47 and SEQ ID NO: 65; SEQ ID NO: 47 and SEQ ID NO: 66; SEQ ID NO: 47 and SEQ ID NO: 67; SEQ ID NO: 47 and SEQ ID NO: 68; SEQ ID NO: 47 and SEQ ID NO: 69; SEQ ID NO: 48 and SEQ ID NO: 53; SEQ ID NO: 48 and SEQ ID NO: 54; SEQ ID NO: 48 and SEQ ID NO: 55; SEQ ID NO: 48 and SEQ ID NO: 56; SEQ ID NO: 48 and SEQ ID NO: 57; SEQ ID NO: 48 and SEQ ID NO: 58; SEQ ID NO: 48 and SEQ ID NO: 59; SEQ ID NO: 48 and SEQ ID NO: 60; SEQ ID NO: 48 and SEQ ID NO: 61; SEQ ID NO: 48 and SEQ ID NO: 62; SEQ ID NO: 48 and SEQ ID NO: 63; SEQ ID NO: 48 and SEQ ID NO: 64; SEQ ID NO: 48 and SEQ ID NO: 65; SEQ ID NO: 48 and SEQ ID NO: 66; SEQ ID NO: 48 and SEQ ID NO: 67; SEQ ID NO: 48 and SEQ ID NO: 68; SEQ ID NO: 48 and SEQ ID NO: 69; SEQ ID NO: 53 and SEQ ID NO: 54; SEQ ID NO: 53 and SEQ ID NO: 55; SEQ ID NO: 53 and SEQ ID NO: 56; SEQ ID NO: 53 and SEQ ID NO: 57; SEQ ID NO: 53 and SEQ ID NO: 58; SEQ ID NO: 53 and SEQ ID NO: 59; SEQ ID NO: 53 and SEQ ID NO: 60; SEQ ID NO: 53 and SEQ ID NO: 61; SEQ ID NO: 53 and SEQ ID NO: 62; SEQ ID NO: 53 and SEQ ID NO: 63; SEQ ID NO: 53 and SEQ ID NO: 64; SEQ ID NO: 53 and SEQ ID NO: 65; SEQ ID NO: 53 and SEQ ID NO: 66; SEQ ID NO: 53 and SEQ ID NO: 67; SEQ ID NO: 53 and SEQ ID NO: 68; SEQ ID NO: 53 and SEQ ID NO: 69; SEQ ID NO: 54 and SEQ ID NO: 55; SEQ ID NO: 54 and SEQ ID NO: 56; SEQ ID NO: 54 and SEQ ID NO: 57; SEQ ID NO: 54 and SEQ ID NO: 58; SEQ ID NO: 54 and SEQ ID NO: 59; SEQ ID NO: 54 and SEQ ID NO: 60; SEQ ID NO: 54 and SEQ ID NO: 61; SEQ ID NO: 54 and SEQ ID NO: 62; SEQ ID NO: 54 and SEQ ID NO: 63; SEQ ID NO: 54 and SEQ ID NO: 64; SEQ ID NO: 54 and SEQ ID NO: 65; SEQ ID NO: 54 and SEQ ID NO: 66; SEQ ID NO: 54 and SEQ ID NO: 67; SEQ ID NO: 54 and SEQ ID NO: 68; SEQ ID NO: 54 and SEQ ID NO: 69; SEQ ID NO: 55 and SEQ ID NO: 56; SEQ ID NO: 55 and SEQ ID NO: 57; SEQ ID NO: 55 and SEQ ID NO: 58; SEQ ID NO: 55 and SEQ ID NO: 59; SEQ ID NO: 55 and SEQ ID NO: 60; SEQ ID NO: 55 and SEQ ID NO: 61; SEQ ID NO: 55 and SEQ ID NO: 62; SEQ ID NO: 55 and SEQ ID NO: 63; SEQ ID NO: 55 and SEQ ID NO: 64; SEQ ID NO: 55 and SEQ ID NO: 65; SEQ ID NO: 55 and SEQ ID NO: 66; SEQ ID NO: 55 and SEQ ID NO: 67; SEQ ID NO: 55 and SEQ ID NO: 68; SEQ ID NO: 55 and SEQ ID NO: 69; SEQ ID NO: 56 and SEQ ID NO: 57; SEQ ID NO: 56 and SEQ ID NO: 58; SEQ ID NO: 56 and SEQ ID NO: 59; SEQ ID NO: 56 and SEQ ID NO: 60; SEQ ID NO: 56 and SEQ ID NO: 61; SEQ ID NO: 56 and SEQ ID NO: 62; SEQ ID NO: 56 and SEQ ID NO: 63; SEQ ID NO: 56 and SEQ ID NO: 64; SEQ ID NO: 56 and SEQ ID NO: 65; SEQ ID NO: 56 and SEQ ID NO: 66; SEQ ID NO: 56 and SEQ ID NO: 67; SEQ ID NO: 56 and SEQ ID NO: 68; SEQ ID NO: 56 and SEQ ID NO: 69; SEQ ID NO: 57 and SEQ ID NO: 58; SEQ ID NO: 57 and SEQ ID NO: 59; SEQ ID NO: 57 and SEQ ID NO: 60; SEQ ID NO: 57 and SEQ ID NO: 61; SEQ ID NO: 57 and SEQ ID NO: 62; SEQ ID NO: 57 and SEQ ID NO: 63; SEQ ID NO: 57 and SEQ ID NO: 64; SEQ ID NO: 57 and SEQ ID NO: 65; SEQ ID NO: 57 and SEQ ID NO: 66; SEQ ID NO: 57 and SEQ ID NO: 67; SEQ ID NO: 57 and SEQ ID NO: 68; SEQ ID NO: 57 and SEQ ID NO: 69; SEQ ID NO: 58 and SEQ ID NO: 59; SEQ ID NO: 58 and SEQ ID NO: 60; SEQ ID NO: 58 and SEQ ID NO: 61; SEQ ID NO: 58 and SEQ ID NO: 62; SEQ ID NO: 58 and SEQ ID NO: 63; SEQ ID NO: 58 and SEQ ID NO: 64; SEQ ID NO: 58 and SEQ ID NO: 65; SEQ ID NO: 58 and SEQ ID NO: 66; SEQ ID NO: 58 and SEQ ID NO: 67; SEQ ID NO: 58 and SEQ ID NO: 68; SEQ ID NO: 58 and SEQ ID NO: 69; SEQ ID NO: 59 and SEQ ID NO: 60; SEQ ID NO: 59 and SEQ ID NO: 61; SEQ ID NO: 59 and SEQ ID NO: 62; SEQ ID NO: 59 and SEQ ID NO: 63; SEQ ID NO: 59 and SEQ ID NO: 64; SEQ ID NO: 59 and SEQ ID NO: 65; SEQ ID NO: 59 and SEQ ID NO: 66; SEQ ID NO: 59 and SEQ ID NO: 67; SEQ ID NO: 59 and SEQ ID NO: 68; SEQ ID NO: 59 and SEQ ID NO: 69; SEQ ID NO: 60 and SEQ ID NO: 61; SEQ ID NO: 60 and SEQ ID NO: 62; SEQ ID NO: 60 and SEQ ID NO: 63; SEQ ID NO: 60 and SEQ ID NO: 64; SEQ ID NO: 60 and SEQ ID NO: 65; SEQ ID NO: 60 and SEQ ID NO: 66; SEQ ID NO: 60 and SEQ ID NO: 67; SEQ ID NO: 60 and SEQ ID NO: 68; SEQ ID NO: 60 and SEQ ID NO: 69; SEQ ID NO: 61 and SEQ ID NO: 62; SEQ ID NO: 61 and SEQ ID NO: 63; SEQ ID NO: 61 and SEQ ID NO: 64; SEQ ID NO: 61 and SEQ ID NO: 65; SEQ ID NO: 61 and SEQ ID NO: 66; SEQ ID NO: 61 and SEQ ID NO: 67; SEQ ID NO: 61 and SEQ ID NO: 68; SEQ ID NO: 61 and SEQ ID NO: 69; SEQ ID NO: 62 and SEQ ID NO: 63; SEQ ID NO: 62 and SEQ ID NO: 64; SEQ ID NO: 62 and SEQ ID NO: 65; SEQ ID NO: 62 and SEQ ID NO: 66; SEQ ID NO: 62 and SEQ ID NO: 67; SEQ ID NO: 62 and SEQ ID NO: 68; SEQ ID NO: 62 and SEQ ID NO: 69; SEQ ID NO: 63 and SEQ ID NO: 64; SEQ ID NO: 63 and SEQ ID NO: 65; SEQ ID NO: 63 and SEQ ID NO: 66; SEQ ID NO: 63 and SEQ ID NO: 67; SEQ ID NO: 63 and SEQ ID NO: 68; SEQ ID NO: 63 and SEQ ID NO: 69; SEQ ID NO: 64 and SEQ ID NO: 65; SEQ ID NO: 64 and SEQ ID NO: 66; SEQ ID NO: 64 and SEQ ID NO: 67; SEQ ID NO: 64 and SEQ ID NO: 68; SEQ ID NO: 64 and SEQ ID NO: 69; SEQ ID NO: 65 and SEQ ID NO: 66; SEQ ID NO: 65 and SEQ ID NO: 67; SEQ ID NO: 65 and SEQ ID NO: 68; SEQ ID NO: 65 and SEQ ID NO: 69; SEQ ID NO: 66 and SEQ ID NO: 67; SEQ ID NO: 66 and SEQ ID NO: 68; SEQ ID NO: 66 and SEQ ID NO: 69; SEQ ID NO: 67 and SEQ ID NO: 68; SEQ ID NO: 67 and SEQ ID NO: 69; SEQ ID NO: 68 and SEQ ID NO: 69; SEQ ID NO: 243 and SEQ ID NO: 244; SEQ ID NO: 243 and SEQ ID NO: 245; SEQ ID NO: 243 and SEQ ID NO: 246; SEQ ID NO: 243 and SEQ ID NO: 247; SEQ ID NO: 243 and SEQ ID NO: 248; SEQ ID NO: 243 and SEQ ID NO: 249; SEQ ID NO: 243 and SEQ ID NO: 250; SEQ ID NO: 243 and SEQ ID NO: 251; SEQ ID NO: 243 and SEQ ID NO: 252; SEQ ID NO: 243 and SEQ ID NO: 253; SEQ ID NO: 243 and SEQ ID NO: 254; SEQ ID NO: 243 and SEQ ID NO: 255; SEQ ID NO: 243 and SEQ ID NO: 256; SEQ ID NO: 243 and SEQ ID NO: 257; SEQ ID NO: 243 and SEQ ID NO: 258; SEQ ID NO: 243 and SEQ ID NO: 259; SEQ ID NO: 243 and SEQ ID NO: 260; SEQ ID NO: 243 and SEQ ID NO: 261; SEQ ID NO: 243 and SEQ ID NO: 262; SEQ ID NO: 243 and SEQ ID NO: 263; SEQ ID NO: 243 and SEQ ID NO: 264; SEQ ID NO: 243 and SEQ ID NO: 265; SEQ ID NO: 243 and SEQ ID NO: 266; SEQ ID NO: 243 and SEQ ID NO: 267; SEQ ID NO: 243 and SEQ ID NO: 268; SEQ ID NO: 243 and SEQ ID NO: 269; SEQ ID NO: 244 and SEQ ID NO: 245; SEQ ID NO: 244 and SEQ ID NO: 246; SEQ ID NO: 244 and SEQ ID NO: 247; SEQ ID NO: 244 and SEQ ID NO: 248; SEQ ID NO: 244 and SEQ ID NO: 249; SEQ ID NO: 244 and SEQ ID NO: 250; SEQ ID NO: 244 and SEQ ID NO: 251; SEQ ID NO: 244 and SEQ ID NO: 252; SEQ ID NO: 244 and SEQ ID NO: 253; SEQ ID NO: 244 and SEQ ID NO: 254; SEQ ID NO: 244 and SEQ ID NO: 255; SEQ ID NO: 244 and SEQ ID NO: 256; SEQ ID NO: 244 and SEQ ID NO: 257; SEQ ID NO: 244 and SEQ ID NO: 258; SEQ ID NO: 244 and SEQ ID NO: 259; SEQ ID NO: 244 and SEQ ID NO: 260; SEQ ID NO: 244 and SEQ ID NO: 261; SEQ ID NO: 244 and SEQ ID NO: 262; SEQ ID NO: 244 and SEQ ID NO: 263; SEQ ID NO: 244 and SEQ ID NO: 264; SEQ ID NO: 244 and SEQ ID NO: 265; SEQ ID NO: 244 and SEQ ID NO: 266; SEQ ID NO: 244 and SEQ ID NO: 267; SEQ ID NO: 244 and SEQ ID NO: 268; SEQ ID NO: 244 and SEQ ID NO: 269; SEQ ID NO: 245 and SEQ ID NO: 246; SEQ ID NO: 245 and SEQ ID NO: 247; SEQ ID NO: 245 and SEQ ID NO: 248; SEQ ID NO: 245 and SEQ ID NO: 249; SEQ ID NO: 245 and SEQ ID NO: 250; SEQ ID NO: 245 and SEQ ID NO: 251; SEQ ID NO: 245 and SEQ ID NO: 252; SEQ ID NO: 245 and SEQ ID NO: 253; SEQ ID NO: 245 and SEQ ID NO: 254; SEQ ID NO: 245 and SEQ ID NO: 255; SEQ ID NO: 245 and SEQ ID NO: 256; SEQ ID NO: 245 and SEQ ID NO: 257; SEQ ID NO: 245 and SEQ ID NO: 258; SEQ ID NO: 245 and SEQ ID NO: 259; SEQ ID NO: 245 and SEQ ID NO: 260; SEQ ID NO: 245 and SEQ ID NO: 261; SEQ ID NO: 245 and SEQ ID NO: 262; SEQ ID NO: 245 and SEQ ID NO: 263; SEQ ID NO: 245 and SEQ ID NO: 264; SEQ ID NO: 245 and SEQ ID NO: 265; SEQ ID NO: 245 and SEQ ID NO: 266; SEQ ID NO: 245 and SEQ ID NO: 267; SEQ ID NO: 245 and SEQ ID NO: 268; SEQ ID NO: 245 and SEQ ID NO: 269; SEQ ID NO: 246 and SEQ ID NO: 247; SEQ ID NO: 246 and SEQ ID NO: 248; SEQ ID NO: 246 and SEQ ID NO: 249; SEQ ID NO: 246 and SEQ ID NO: 250; SEQ ID NO: 246 and SEQ ID NO: 251; SEQ ID NO: 246 and SEQ ID NO: 252; SEQ ID NO: 246 and SEQ ID NO: 253; SEQ ID NO: 246 and SEQ ID NO: 254; SEQ ID NO: 246 and SEQ ID NO: 255; SEQ ID NO: 246 and SEQ ID NO: 256; SEQ ID NO: 246 and SEQ ID NO: 257; SEQ ID NO: 246 and SEQ ID NO: 258; SEQ ID NO: 246 and SEQ ID NO: 259; SEQ ID NO: 246 and SEQ ID NO: 260; SEQ ID NO: 246 and SEQ ID NO: 261; SEQ ID NO: 246 and SEQ ID NO: 262; SEQ ID NO: 246 and SEQ ID NO: 263; SEQ ID NO: 246 and SEQ ID NO: 264; SEQ ID NO: 246 and SEQ ID NO: 265; SEQ ID NO: 246 and SEQ ID NO: 266; SEQ ID NO: 246 and SEQ ID NO: 267; SEQ ID NO: 246 and SEQ ID NO: 268; SEQ ID NO: 246 and SEQ ID NO: 269; SEQ ID NO: 247 and SEQ ID NO: 248; SEQ ID NO: 247 and SEQ ID NO: 249; SEQ ID NO: 247 and SEQ ID NO: 250; SEQ ID NO: 247 and SEQ ID NO: 251; SEQ ID NO: 247 and SEQ ID NO: 252; SEQ ID NO: 247 and SEQ ID NO: 253; SEQ ID NO: 247 and SEQ ID NO: 254; SEQ ID NO: 247 and SEQ ID NO: 255; SEQ ID NO: 247 and SEQ ID NO: 256; SEQ ID NO: 247 and SEQ ID NO: 257; SEQ ID NO: 247 and SEQ ID NO: 258; SEQ ID NO: 247 and SEQ ID NO: 259; SEQ ID NO: 247 and SEQ ID NO: 260; SEQ ID NO: 247 and SEQ ID NO: 261; SEQ ID NO: 247 and SEQ ID NO: 262; SEQ ID NO: 247 and SEQ ID NO: 263; SEQ ID NO: 247 and SEQ ID NO: 264; SEQ ID NO: 247 and SEQ ID NO: 265; SEQ ID NO: 247 and SEQ ID NO: 266; SEQ ID NO: 247 and SEQ ID NO: 267; SEQ ID NO: 247 and SEQ ID NO: 268; SEQ ID NO: 247 and SEQ ID NO: 269; SEQ ID NO: 248 and SEQ ID NO: 249; SEQ ID NO: 248 and SEQ ID NO: 250; SEQ ID NO: 248 and SEQ ID NO: 251; SEQ ID NO: 248 and SEQ ID NO: 252; SEQ ID NO: 248 and SEQ ID NO: 253; SEQ ID NO: 248 and SEQ ID NO: 254; SEQ ID NO: 248 and SEQ ID NO: 255; SEQ ID NO: 248 and SEQ ID NO: 256; SEQ ID NO: 248 and SEQ ID NO: 257; SEQ ID NO: 248 and SEQ ID NO: 258; SEQ ID NO: 248 and SEQ ID NO: 259; SEQ ID NO: 248 and SEQ ID NO: 260; SEQ ID NO: 248 and SEQ ID NO: 261; SEQ ID NO: 248 and SEQ ID NO: 262; SEQ ID NO: 248 and SEQ ID NO: 263; SEQ ID NO: 248 and SEQ ID NO: 264; SEQ ID NO: 248 and SEQ ID NO: 265; SEQ ID NO: 248 and SEQ ID NO: 266; SEQ ID NO: 248 and SEQ ID NO: 267; SEQ ID NO: 248 and SEQ ID NO: 268; SEQ ID NO: 248 and SEQ ID NO: 269; SEQ ID NO: 249 and SEQ ID NO: 250; SEQ ID NO: 249 and SEQ ID NO: 251; SEQ ID NO: 249 and SEQ ID NO: 252; SEQ ID NO: 249 and SEQ ID NO: 253; SEQ ID NO: 249 and SEQ ID NO: 254; SEQ ID NO: 249 and SEQ ID NO: 255; SEQ ID NO: 249 and SEQ ID NO: 256; SEQ ID NO: 249 and SEQ ID NO: 257; SEQ ID NO: 249 and SEQ ID NO: 258; SEQ ID NO: 249 and SEQ ID NO: 259; SEQ ID NO: 249 and SEQ ID NO: 260; SEQ ID NO: 249 and SEQ ID NO: 261; SEQ ID NO: 249 and SEQ ID NO: 262; SEQ ID NO: 249 and SEQ ID NO: 263; SEQ ID NO: 249 and SEQ ID NO: 264; SEQ ID NO: 249 and SEQ ID NO: 265; SEQ ID NO: 249 and SEQ ID NO: 266; SEQ ID NO: 249 and SEQ ID NO: 267; SEQ ID NO: 249 and SEQ ID NO: 268; SEQ ID NO: 249 and SEQ ID NO: 269; SEQ ID NO: 250 and SEQ ID NO: 251; SEQ ID NO: 250 and SEQ ID NO: 252; SEQ ID NO: 250 and SEQ ID NO: 253; SEQ ID NO: 250 and SEQ ID NO: 254; SEQ ID NO: 250 and SEQ ID NO: 255; SEQ ID NO: 250 and SEQ ID NO: 256; SEQ ID NO: 250 and SEQ ID NO: 257; SEQ ID NO: 250 and SEQ ID NO: 258; SEQ ID NO: 250 and SEQ ID NO: 259; SEQ ID NO: 250 and SEQ ID NO: 260; SEQ ID NO: 250 and SEQ ID NO: 261; SEQ ID NO: 250 and SEQ ID NO: 262; SEQ ID NO: 250 and SEQ ID NO: 263; SEQ ID NO: 250 and SEQ ID NO: 264; SEQ ID NO: 250 and SEQ ID NO: 265; SEQ ID NO: 250 and SEQ ID NO: 266; SEQ ID NO: 250 and SEQ ID NO: 267; SEQ ID NO: 250 and SEQ ID NO: 268; SEQ ID NO: 250 and SEQ ID NO: 269; SEQ ID NO: 251 and SEQ ID NO: 252; SEQ ID NO: 251 and SEQ ID NO: 253; SEQ ID NO: 251 and SEQ ID NO: 254; SEQ ID NO: 251 and SEQ ID NO: 255; SEQ ID NO: 251 and SEQ ID NO: 256; SEQ ID NO: 251 and SEQ ID NO: 257; SEQ ID NO: 251 and SEQ ID NO: 258; SEQ ID NO: 251 and SEQ ID NO: 259; SEQ ID NO: 251 and SEQ ID NO: 260; SEQ ID NO: 251 and SEQ ID NO: 261; SEQ ID NO: 251 and SEQ ID NO: 262; SEQ ID NO: 251 and SEQ ID NO: 263; SEQ ID NO: 251 and SEQ ID NO: 264; SEQ ID NO: 251 and SEQ ID NO: 265; SEQ ID NO: 251 and SEQ ID NO: 266; SEQ ID NO: 251 and SEQ ID NO: 267; SEQ ID NO: 251 and SEQ ID NO: 268; SEQ ID NO: 251 and SEQ ID NO: 269; SEQ ID NO: 252 and SEQ ID NO: 253; SEQ ID NO: 252 and SEQ ID NO: 254; SEQ ID NO: 252 and SEQ ID NO: 255; SEQ ID NO: 252 and SEQ ID NO: 256; SEQ ID NO: 252 and SEQ ID NO: 257; SEQ ID NO: 252 and SEQ ID NO: 258; SEQ ID NO: 252 and SEQ ID NO: 259; SEQ ID NO: 252 and SEQ ID NO: 260; SEQ ID NO: 252 and SEQ ID NO: 261; SEQ ID NO: 252 and SEQ ID NO: 262; SEQ ID NO: 252 and SEQ ID NO: 263; SEQ ID NO: 252 and SEQ ID NO: 264; SEQ ID NO: 252 and SEQ ID NO: 265; SEQ ID NO: 252 and SEQ ID NO: 266; SEQ ID NO: 252 and SEQ ID NO: 267; SEQ ID NO: 252 and SEQ ID NO: 268; SEQ ID NO: 252 and SEQ ID NO: 269; SEQ ID NO: 253 and SEQ ID NO: 254; SEQ ID NO: 253 and SEQ ID NO: 255; SEQ ID NO: 253 and SEQ ID NO: 256; SEQ ID NO: 253 and SEQ ID NO: 257; SEQ ID NO: 253 and SEQ ID NO: 258; SEQ ID NO: 253 and SEQ ID NO: 259; SEQ ID NO: 253 and SEQ ID NO: 260; SEQ ID NO: 253 and SEQ ID NO: 261; SEQ ID NO: 253 and SEQ ID NO: 262; SEQ ID NO: 253 and SEQ ID NO: 263; SEQ ID NO: 253 and SEQ ID NO: 264; SEQ ID NO: 253 and SEQ ID NO: 265; SEQ ID NO: 253 and SEQ ID NO: 266; SEQ ID NO: 253 and SEQ ID NO: 267; SEQ ID NO: 253 and SEQ ID NO: 268; SEQ ID NO: 253 and SEQ ID NO: 269; SEQ ID NO: 254 and SEQ ID NO: 255; SEQ ID NO: 254 and SEQ ID NO: 256; SEQ ID NO: 254 and SEQ ID NO: 257; SEQ ID NO: 254 and SEQ ID NO: 258; SEQ ID NO: 254 and SEQ ID NO: 259; SEQ ID NO: 254 and SEQ ID NO: 260; SEQ ID NO: 254 and SEQ ID NO: 261; SEQ ID NO: 254 and SEQ ID NO: 262; SEQ ID NO: 254 and SEQ ID NO: 263; SEQ ID NO: 254 and SEQ ID NO: 264; SEQ ID NO: 254 and SEQ ID NO: 265; SEQ ID NO: 254 and SEQ ID NO: 266; SEQ ID NO: 254 and SEQ ID NO: 267; SEQ ID NO: 254 and SEQ ID NO: 268; SEQ ID NO: 254 and SEQ ID NO: 269; SEQ ID NO: 255 and SEQ ID NO: 256; SEQ ID NO: 255 and SEQ ID NO: 257; SEQ ID NO: 255 and SEQ ID NO: 258; SEQ ID NO: 255 and SEQ ID NO: 259; SEQ ID NO: 255 and SEQ ID NO: 260; SEQ ID NO: 255 and SEQ ID NO: 261; SEQ ID NO: 255 and SEQ ID NO: 262; SEQ ID NO: 255 and SEQ ID NO: 263; SEQ ID NO: 255 and SEQ ID NO: 264; SEQ ID NO: 255 and SEQ ID NO: 265; SEQ ID NO: 255 and SEQ ID NO: 266; SEQ ID NO: 255 and SEQ ID NO: 267; SEQ ID NO: 255 and SEQ ID NO: 268; SEQ ID NO: 255 and SEQ ID NO: 269; SEQ ID NO: 256 and SEQ ID NO: 257; SEQ ID NO: 256 and SEQ ID NO: 258; SEQ ID NO: 256 and SEQ ID NO: 259; SEQ ID NO: 256 and SEQ ID NO: 260; SEQ ID NO: 256 and SEQ ID NO: 261; SEQ ID NO: 256 and SEQ ID NO: 262; SEQ ID NO: 256 and SEQ ID NO: 263; SEQ ID NO: 256 and SEQ ID NO: 264; SEQ ID NO: 256 and SEQ ID NO: 265; SEQ ID NO: 256 and SEQ ID NO: 266; SEQ ID NO: 256 and SEQ ID NO: 267; SEQ ID NO: 256 and SEQ ID NO: 268; SEQ ID NO: 256 and SEQ ID NO: 269; SEQ ID NO: 257 and SEQ ID NO: 258; SEQ ID NO: 257 and SEQ ID NO: 259; SEQ ID NO: 257 and SEQ ID NO: 260; SEQ ID NO: 257 and SEQ ID NO: 261; SEQ ID NO: 257 and SEQ ID NO: 262; SEQ ID NO: 257 and SEQ ID NO: 263; SEQ ID NO: 257 and SEQ ID NO: 264; SEQ ID NO: 257 and SEQ ID NO: 265; SEQ ID NO: 257 and SEQ ID NO: 266; SEQ ID NO: 257 and SEQ ID NO: 267; SEQ ID NO: 257 and SEQ ID NO: 268; SEQ ID NO: 257 and SEQ ID NO: 269; SEQ ID NO: 258 and SEQ ID NO: 259; SEQ ID NO: 258 and SEQ ID NO: 260; SEQ ID NO: 258 and SEQ ID NO: 261; SEQ ID NO: 258 and SEQ ID NO: 262; SEQ ID NO: 258 and SEQ ID NO: 263; SEQ ID NO: 258 and SEQ ID NO: 264; SEQ ID NO: 258 and SEQ ID NO: 265; SEQ ID NO: 258 and SEQ ID NO: 266; SEQ ID NO: 258 and SEQ ID NO: 267; SEQ ID NO: 258 and SEQ ID NO: 268; SEQ ID NO: 258 and SEQ ID NO: 269; SEQ ID NO: 259 and SEQ ID NO: 260; SEQ ID NO: 259 and SEQ ID NO: 261; SEQ ID NO: 259 and SEQ ID NO: 262; SEQ ID NO: 259 and SEQ ID NO: 263; SEQ ID NO: 259 and SEQ ID NO: 264; SEQ ID NO: 259 and SEQ ID NO: 265; SEQ ID NO: 259 and SEQ ID NO: 266; SEQ ID NO: 259 and SEQ ID NO: 267; SEQ ID NO: 259 and SEQ ID NO: 268; SEQ ID NO: 259 and SEQ ID NO: 269; SEQ ID NO: 260 and SEQ ID NO: 261; SEQ ID NO: 260 and SEQ ID NO: 262; SEQ ID NO: 260 and SEQ ID NO: 263; SEQ ID NO: 260 and SEQ ID NO: 264; SEQ ID NO: 260 and SEQ ID NO: 265; SEQ ID NO: 260 and SEQ ID NO: 266; SEQ ID NO: 260 and SEQ ID NO: 267; SEQ ID NO: 260 and SEQ ID NO: 268; SEQ ID NO: 260 and SEQ ID NO: 269; SEQ ID NO: 261 and SEQ ID NO: 262; SEQ ID NO: 261 and SEQ ID NO: 263; SEQ ID NO: 261 and SEQ ID NO: 264; SEQ ID NO: 261 and SEQ ID NO: 265; SEQ ID NO: 261 and SEQ ID NO: 266; SEQ ID NO: 261 and SEQ ID NO: 267; SEQ ID NO: 261 and SEQ ID NO: 268; SEQ ID NO: 261 and SEQ ID NO: 269; SEQ ID NO: 262 and SEQ ID NO: 263; SEQ ID NO: 262 and SEQ ID NO: 264; SEQ ID NO: 262 and SEQ ID NO: 265; SEQ ID NO: 262 and SEQ ID NO: 266; SEQ ID NO: 262 and SEQ ID NO: 267; SEQ ID NO: 262 and SEQ ID NO: 268; SEQ ID NO: 262 and SEQ ID NO: 269; SEQ ID NO: 263 and SEQ ID NO: 264; SEQ ID NO: 263 and SEQ ID NO: 265; SEQ ID NO: 263 and SEQ ID NO: 266; SEQ ID NO: 263 and SEQ ID NO: 267; SEQ ID NO: 263 and SEQ ID NO: 268; SEQ ID NO: 263 and SEQ ID NO: 269; SEQ ID NO: 264 and SEQ ID NO: 265; SEQ ID NO: 264 and SEQ ID NO: 266; SEQ ID NO: 264 and SEQ ID NO: 267; SEQ ID NO: 264 and SEQ ID NO: 268; SEQ ID NO: 264 and SEQ ID NO: 269; SEQ ID NO: 265 and SEQ ID NO: 266; SEQ ID NO: 265 and SEQ ID NO: 267; SEQ ID NO: 265 and SEQ ID NO: 268; SEQ ID NO: 265 and SEQ ID NO: 269; SEQ ID NO: 266 and SEQ ID NO: 267; SEQ ID NO: 266 and SEQ ID NO: 268; SEQ ID NO: 266 and SEQ ID NO: 269; SEQ ID NO: 267 and SEQ ID NO: 268; SEQ ID NO: 267 and SEQ ID NO: 269; SEQ ID NO: 268 and SEQ ID NO: 269.

[0150] In one aspect, a composition is provided comprising a single nucleic acid molecule encoding, or two nucleic acid molecules where one molecule encodes, 1) one or more guide RNA that comprises a guide sequence selected from any one of SEQ ID NOs: 11-15 or 27-69; and 2) a SaCas9. In one aspect, a composition is provided comprising a single nucleic acid molecule encoding, or two nucleic acid molecules where one molecule encodes, 1) one or more guide RNA that comprises a guide sequence selected from any one of SEQ ID NOs: 243-269; and 2) a SluCas9.

[0151] In one aspect, a composition is provided comprising a single nucleic acid molecule encoding, or two nucleic acid molecules where one molecule encodes, a) one or more guide RNA that comprises a guide sequence that is at least 99%, 98%, 97%, 96%, 95%, 94%, 93%, 92%, 91%, or 90% identical to any one of SEQ ID NOs: 11-15 or 27-69 and a SaCas9; or b) one or more guide RNA that comprises a guide sequence that is at least 99%, 98%, 97%, 96%, 95%, 94%, 93%, 92%, 91%, or 90% identical to any one of SEQ ID NOs: 243-269; and a SluCas9. In one aspect, a composition is provided comprising a single nucleic acid molecule encoding a) one or more guide RNA that comprises a guide sequence that is at least 99%, 98%, 97%, 96%, 95%, 94%, 93%, 92%, 91%, or 90% identical to any one of 1) SEQ ID NOs: 243-269, and a SluCas9; or b) one or more guide RNA that comprises a guide sequence that is at least 99%, 98%, 97%, 96%, 95%, 94%, 93%, 92%, 91%, or 90% identical to any one of SEQ ID NOs: 11-15 or 27-69, and a SaCas9.

[0152] In another aspect, a composition is provided comprising a single nucleic acid molecule encoding, or two nucleic acid molecules where one molecule encodes, a) one or more guide RNA that comprises a guide sequence comprising at least 17, 18, 19, or 20 contiguous nucleotides of a spacer sequence selected from any one of SEQ ID NOs: 11-15 or 27-69 and a SaCas9; or b) one or more guide RNA that comprises a guide sequence comprising at least 17, 18, 19, or 20 contiguous nucleotides of a spacer sequence selected from any one of SEQ ID NOs: 243-269 and a SluCas9. In another aspect, a composition is provided comprising a single nucleic acid molecule encoding, or two nucleic acid molecules where one molecule encodes, a) one or more guide RNA that comprises a guide sequence comprising at least 17, 18, 19, or 20 contiguous nucleotides of a spacer sequence selected from any one of SEQ ID NOs: 11-15 or 27-69 and a SaCas9; or b) one or more guide RNA that comprises a guide sequence comprising at least 17, 18, 19, or 20 contiguous nucleotides of a spacer sequence selected from any one of SEQ ID NOs: 243-269 and a SluCas9.

[0153] In some embodiments, any of the guides disclosed herein may be used as a research tool, e.g., to study trafficking, expression, and processing by cells.

### Scaffold Sequences

[0154] Each of the guide sequences shown in Table 2 may further comprise additional nucleotides to form or encode a crRNA, e.g., using any known sequence appropriate for the Cas9 being used. In some embodiments, the crRNA comprises (5′ to 3′) at least a spacer sequence and a first complementarity domain. The first complementary domain is sufficiently complementary to a second complementarity domain, which may be part of the same molecule in the case of an sgRNA or in a tracrRNA in the case of a dual or modular gRNA, to form a duplex. See, e.g., US 2017/0007679 for detailed discussion of crRNA and gRNA domains, including first and second complementarity domains.

[0155] A single-molecule guide RNA (sgRNA) can comprise, in the 5′ to 3′ direction, an optional spacer extension sequence, a spacer sequence, a minimum CRISPR repeat sequence, a single-molecule guide linker, a minimum tracrRNA sequence, a 3′ tracrRNA sequence and/or an optional tracrRNA extension sequence. The optional tracrRNA extension can comprise elements that contribute additional functionality (e.g., stability) to the guide RNA. The single-molecule guide linker can link the minimum CRISPR repeat and the minimum tracrRNA sequence to form a hairpin structure. The optional tracrRNA extension can comprise one or more hairpins. In particular embodiments, the disclosure provides for an sgRNA comprising a spacer sequence and a tracrRNA sequence.

[0156] The guide RNA can be considered to comprise a scaffold sequence necessary for endonuclease binding and a spacer sequence required to bind to the genomic target sequence. An exemplary scaffold sequence suitable for use with SaCas9 to follow the guide sequence at its 3′ end is: GTTTAAGTACTCTGTGCTGGAAACAGCACAGAATCTACTTAAACAAGGCAAAATGCCGT GTTTATCTCGTCAACTTGTTGGCGAGA (SEQ ID NO: 500) in 5′ to 3′ orientation. In some embodiments, an exemplary scaffold sequence for use with SaCas9 to follow the 3′ end of the guide sequence is a sequence that is at least 80%, 85%, 90%, 91%, 92%, 93%, 94%, 95%, 96%, 97%, 98%, 99% or 100% identical to SEQ ID NO: 500, or a sequence that differs from SEQ ID NO: 500 by no more than 1, 2, 3, 4, 5, 10, 15, 20, or 25 nucleotides.

[0157] In some embodiments, a variant of an SaCas9 scaffold sequence may be used. In some embodiments, the SaCas9 scaffold to follow the guide sequence at its 3′ end is referred to as “SaScaffoldV1” and is: GTTTTAGTACTCTGGAAACAGAATCTACTAAAACAAGGCAAAATGCCGTGTTTATCTCGT CAACTTGTTGGCGAGAT (SEQ ID NO: 501) in 5′ to 3′ orientation. In some embodiments, an exemplary scaffold sequence for use with SaCas9 to follow the 3′ end of the guide sequence is a sequence that is at least 80%, 85%, 90%, 91%, 92%, 93%, 94%, 95%, 96%, 97%, 98%, 99% or 100% identical to SEQ ID NO: 501, or a sequence that differs from SEQ ID NO: 501 by no more than 1, 2, 3, 4, 5, 10, 15, 20, or 25 nucleotides.

[0158] In some embodiments, a variant of an SaCas9 scaffold sequence may be used. In some embodiments, the SaCas9 scaffold to follow the guide sequence at its 3′ end is referred to as “SaScaffoldV2” and is: GTTTAAGTACTCTGTGCTGGAAACAGCACAGAATCTACTTAAACAAGGCAAAATGCCGT GTTTATCTCGTCAACTTGTTGGCGAGAT (SEQ ID NO: 502) in 5′ to 3′ orientation. In some embodiments, an exemplary scaffold sequence for use with SaCas9 to follow the 3′ end of the guide sequence is a sequence that is at least 80%, 85%, 90%, 91%, 92%, 93%, 94%, 95%, 96%, 97%, 98%, 99% or 100% identical to SEQ ID NO: 502, or a sequence that differs from SEQ ID NO: 502 by no more than 1, 2, 3, 4, 5, 10, 15, 20, or 25 nucleotides.

[0159] In some embodiments, a variant of an SaCas9 scaffold sequence may be used. In some embodiments, the SaCas9 scaffold to follow the guide sequence at its 3′ end is referred to as “SaScaffoldV3” and is: GTTTAAGTACTCTGGAAACAGAATCTACTTAAACAAGGCAAAATGCCGTGTTTATCTCGT CAACTTGTTGGCGAGAT (SEQ ID NO: 503) in 5′ to 3′ orientation. In some embodiments, an exemplary scaffold sequence for use with SaCas9 to follow the 3′ end of the guide sequence is a sequence that is at least 80%, 85%, 90%, 91%, 92%, 93%, 94%, 95%, 96%, 97%, 98%, 99% or 100% identical to SEQ ID NO: 503, or a sequence that differs from SEQ ID NO: 503 by no more than 1, 2, 3, 4, 5, 10, 15, 20, or 25 nucleotides.

[0160] In some embodiments, a variant of an SaCas9 scaffold sequence may be used. In some embodiments, the SaCas9 scaffold to follow the guide sequence at its 3′ end is referred to as “SaScaffoldV5” and is: GTTTCAGTACTCTGGAAACAGAATCTACTGAAACAAGGCAAAATGCCGTGTTTATCTCGT CAACTTGTTGGCGAGAT (SEQ ID NO: 504) in 5′ to 3′ orientation. In some embodiments, an exemplary scaffold sequence for use with SaCas9 to follow the 3′ end of the guide sequence is a sequence that is at least 80%, 85%, 90%, 91%, 92%, 93%, 94%, 95%, 96%, 97%, 98%, 99% or 100% identical to SEQ ID NO: 504, or a sequence that differs from SEQ ID NO: 504 by no more than 1, 2, 3, 4, 5, 10, 15, 20, or 25 nucleotides.

[0161] Two exemplary scaffold sequences suitable for use with SluCas9 to follow the guide sequence at its 3′ end is: GTTTTAGTACTCTGGAAACAGAATCTACTGAAACAAGACAATATGTCGTGTTTATCCCAT CAATTTATTGGTGGGA (SEQ ID NO: 600), and GTTTAAGTACTCTGTGCTGGAAACAGCACAGAATCTACTGAAACAAGACAATATGTCGT GTTTATCCCATCAATTTATTGGTGGGA (SEQ ID NO: 601) in 5′ to 3′ orientation. In some embodiments, an exemplary sequence for use with SluCas9 to follow the 3′ end of the guide sequence is a sequence that is at least 80%, 85%, 90%, 91%, 92%, 93%, 94%, 95%, 96%, 97%, 98%, 99% or 100% identical to SEQ ID NO: 600 or SEQ ID NO: 601, or a sequence that differs from SEQ ID NO: 600 or SEQ ID NO: 601 by no more than 1, 2, 3, 4, 5, 10, 15, 20, or 25 nucleotides.

[0162] Exemplary scaffold sequences suitable for use with SluCas9 to follow the guide sequence at its 3′ end are also shown below in the 5′ to 3′ orientation.

TABLE 4

| | | | | Streak of |
|---|---|---|---|---|
| | | | | Homology to |
| Scaffold | SEQ | | Homology | Slu v5 |
| ID | ID NO | Scaffold Sequence (5′ to 3′) | to Slu v5 | (# nucleotides) |
| Wildtype | 900 | GTTTTAGTACTCTGGAAACAGAATCTACTGAA | N/A | N/A |
| | | ACAAGACAATATGTCGTGTTTATCCCATCAAT | | |
| | | TTATTGGTGGGAT | | |
| Slu- | 601 | GTTTAAGTACTCTGTGCTGGAAACAGCACAG | N/A | N/A |
| VCGT- | | AATCTACTGAAACAAGACAATATGTCGTGTTT | | |
| 4.5 | | ATCCCATCAATTTATTGGTGGGA | | |
| Slu_v5 | 901 | GTTTCAGTACTCTGGAAACAGAATCTACTGAA | 100.00% | 77 |
| | | ACAAGACAATATGTCGTGTTTATCCCATCAAT | | |
| | | TTATTGGTGGGAT | | |
| Slu_v5-1 | 902 | GTTTggTaACcTaGGAAACTagATCTTaccAAACA | 87.50% | 47 |
| | | AGACAATATGTCGTGTTTATCCCATCAATTTA | | |
| | | TTGGTGGGAT | | |
| Slu_v5-2 | 903 | GTTTCAGTACTCTGGAAACAGAATCTACTGAA | 96.10% | 37 |
| | | ACAAGgCAAaATGcCGTGTTTATCCCATCAATT | | |
| | | TATTGGTGGGAT | | |
| Slu_v5-3 | 904 | GTTTCAGTACTCTGGAAACAGAATCTACTGAA | 94.81% | 48 |
| | | ACAAGACAATATGTCGcgcccaTCCCATCAATTT | | |
| | | ATTGGTGGGAT | | |
| Slu_v5-4 | 905 | GTTTCAGTACTCTGGAAACAGAATCTACTGAA | 91.55% | 55 |
| | | ACAAGACAATATGTCGTGTTTATgggTTgAATT | | |
| | | TATTcGacccAT | | |
| Slu_v5-5 | 906 | GTTTggTaACcTaGGAAACTagATCTTaccAAACA | 83.75% | 31 |
| | | AGgCAAaATGcCGTGTTTATCCCATCAATTTAT | | |
| | | TGGTGGGAT | | |
| Slu_v5-6 | 907 | GTTTggTaACcTaGGAAACTagATCTTaccAAACA | 82.50% | 23 |
| | | AGACAATATGTCGcgcccaTCCCATCAATTTATT | | |
| | | GGTGGGAT | | |
| Slu_v5-7 | 908 | GTTTggTaACcTaGGAAACTagATCTTaccAAACA | 78.38% | 25 |
| | | AGACAATATGTCGTGTTTATgggTTgAATTTAT | | |
| | | TcGacccAT | | |
| Slu_v5-8 | 909 | GTTTCAGTACTCTGGAAACAGAATCTACTGAA | 90.91% | 37 |
| | | ACAAGgCAAaATGcCGcgcccaTCCCATCAATTTA | | |
| | | TTGGTGGGAT | | |
| Slu_v5-9 | 910 | GTTTCAGTACTCTGGAAACAGAATCTACTGAA | 87.32% | 37 |
| | | ACAAGgCAAaATGcCGTGTTTATgggTTgAATTT | | |
| | | ATTcGacccAT | | |
| Slu_v5- | 911 | GTTTCAGTACTCTGGAAACAGAATCTACTGAA | 82.89% | 48 |
| 10 | | ACAAGACAATATGTCGcgcccaTgggTTgAATTTA | | |
| | | TTcGacccAT | | |
| Slu_v5- | 912 | GTTTggTaACcTaGGAAACTagATCTTaccAAACA | 78.75% | 23 |
| 11 | | AGgCAAaATGcCGcgcccaTCCCATCAATTTATTG | | |
| | | GTGGGAT | | |
| Slu_v5- | 913 | GTTTggTaACcTaGGAAACTagATCTTaccAAACA | 74.32% | 9 |
| 12 | | AGgCAAaATGcCGTGTTTATgggTTgAATTTATTc | | |
| | | GacccAT | | |
| Slu_v5- | 914 | GTTTggTaACcTaGGAAACTagATCTTaccAAACA | 70.89% | 18 |
| 13 | | AGACAATATGTCGcgcccaTgggTTgAATTTATTc | | |
| | | GacccAT | | |
| Slu_v5- | 915 | GTTTCAGTACTCTGGAAACAGAATCTACTGAA | 78.95% | 37 |
| 14 | | ACAAGgCAAaATGcCGcgcccaTgggTTgAATTTAT | | |
| | | TcGacccAT | | |
| Slu_v5- | 916 | GTTTggTaACcTaGGAAACTagATCTTaccAAACA | 67.09% | 8 |
| 15 | | AGgCAAaATGcCGcgcccaTgggTTgAATTTATTcGa | | |
| | | cccAT | | |
| Slu v4 | 917 | GTTTCAGTACTCTGTGCTGGAAACAGCACAGA | N/A | N/A |
| | | ATCTACTGAAACAAGACAATATGTCGTGTTTA | | |
| | | TCCCATCAATTTATTGGTGGGAT | | |

[0163] In some embodiments, the scaffold sequence suitable for use with SaCas9 to follow the guide sequence at its 3′ end is selected from any one of SEQ ID NOs: 500-504 in 5′ to 3 orientation. In some embodiments, an exemplary sequence for use with SaCas9 to follow the 3′ end of the guide sequence is a sequence that is at least 65%, 70%, 75%, 80%, 85%, 90%, 91%, 92%, 93%, 94%, 95%, 96%, 97%, 98%, 99% or 10000 identical to any one off SEQ ID NOs: 500-504, or a sequence that differs from any one of SEQ ID NOs: 500-504 by no more than 1, 2, 3, 4, 5, 10, 15, 20, or 25 nucleotides.

[0164] In some embodiments, the scaffold sequence suitable for use with SluCas9 to follow the guide sequence at its 3′ end is selected from any one of SEQ ID NOs: 900 or 601, or 901-917 in 5′ to 3 orientation. In some embodiments, an exemplary sequence for use with SluCas9 to follow the 3′ end of the guide sequence is a sequence that is at least 65%, 70%, 75%, 80%, 85%, 90%, 91%, 92%, 93%, 94%, 95%, 96%, 97%, 98%, 99% or 100% identical to any one off SEQ ID NOs: 900 or 601, or 901-917, or a sequence that differs from any one of SEQ ID NOs: 900 or 601, or 901-917 by no more than 1, 2, 3, 4, 5, 10, 15, 20, or 25 nucleotides.

[0165] In some embodiments, the nucleic acid encoding the gRNA comprises a sequence comprising SEQ ID NO: 500. In some embodiments, the nucleic acid encoding the gRNA comprises a sequence comprising SEQ ID NO: 501. In some embodiments, the nucleic acid encoding the gRNA comprises a sequence comprising SEQ ID NO: 502. In some embodiments, the nucleic acid encoding the gRNA comprises a sequence comprising SEQ ID NO: 503. In some embodiments, the nucleic acid encoding the gRNA comprises a sequence comprising SEQ ID NO: 504. In some embodiments, comprising a pair of gRNAs, one of the gRNAs comprises a sequence selected from any one of SEQ ID NOs: 500-504. In some embodiments, comprising a pair of gRNAs, both of the gRNAs comprise a sequence selected from any one of SEQ ID NOs: 500-504. In some embodiments, comprising a pair of gRNAs, the nucleotides 3′ of the guide sequence of the gRNAs are the same sequence. In some embodiments, comprising a pair of gRNAs, the nucleotides 3′ of the guide sequence of the gRNAs are different sequences.

[0166] In some embodiments, the nucleic acid encoding the gRNA comprises a sequence comprising SEQ ID NO: 900. In some embodiments, the nucleic acid encoding the gRNA comprises a sequence comprising SEQ ID NO: 601. In some embodiments, the nucleic acid encoding the gRNA comprises a sequence comprising SEQ ID NO: 900. In some embodiments, the nucleic acid encoding the gRNA comprises a sequence comprising SEQ ID NO: 901. In some embodiments, the nucleic acid encoding the gRNA comprises a sequence comprising SEQ ID NO: 902. In some embodiments, the nucleic acid encoding the gRNA comprises a sequence comprising SEQ ID NO: 903. In some embodiments, the nucleic acid encoding the gRNA comprises a sequence comprising SEQ ID NO: 904. In some embodiments, the nucleic acid encoding the gRNA comprises a sequence comprising SEQ ID NO: 905. In some embodiments, the nucleic acid encoding the gRNA comprises a sequence comprising SEQ ID NO: 906. In some embodiments, the nucleic acid encoding the gRNA comprises a sequence comprising SEQ ID NO: 907. In some embodiments, the nucleic acid encoding the gRNA comprises a sequence comprising SEQ ID NO: 908. In some embodiments, the nucleic acid encoding the gRNA comprises a sequence comprising SEQ ID NO: 909. In some embodiments, the nucleic acid encoding the gRNA comprises a sequence comprising SEQ ID NO: 910. In some embodiments, the nucleic acid encoding the gRNA comprises a sequence comprising SEQ ID NO: 911. In some embodiments, the nucleic acid encoding the gRNA comprises a sequence comprising SEQ ID NO: 912. In some embodiments, the nucleic acid encoding the gRNA comprises a sequence comprising SEQ ID NO: 913. In some embodiments, the nucleic acid encoding the gRNA comprises a sequence comprising SEQ ID NO: 914. In some embodiments, the nucleic acid encoding the gRNA comprises a sequence comprising SEQ ID NO: 915. In some embodiments, the nucleic acid encoding the gRNA comprises a sequence comprising SEQ ID NO: 916. In some embodiments, the nucleic acid encoding the gRNA comprises a sequence comprising SEQ ID NO: 917. In some embodiments, comprising a pair of gRNAs, one of the gRNAs comprises a sequence selected from any one of SEQ ID NOs: 900 or 601, or 901-917. In some embodiments, comprising a pair of gRNAs, both of the gRNAs comprise a sequence selected from any one of SEQ ID NOs: 900 or 601, or 901-917. In some embodiments, comprising a pair of gRNAs, the nucleotides 3′ of the guide sequence of the gRNAs are the same sequence. In some embodiments, comprising a pair of gRNAs, the nucleotides 3′ of the guide sequence of the gRNAs are different sequences.

[0167] In some embodiments, the scaffold sequence comprises one or more alterations in the stem loop 1 as compared to the stem loop 1 of a wildtype SluCas9 scaffold sequence (e.g., a scaffold comprising the sequence of SEQ ID NO: 900) or a reference SluCas9 scaffold sequence (e.g., a scaffold comprising the sequence of SEQ ID NO: 901). In some embodiments, the scaffold sequence comprises one or more alterations in the stem loop 2 as compared to the stem loop 2 of a wildtype SluCas9 scaffold sequence (e.g., a scaffold comprising the sequence of SEQ ID NO: 900) or a reference SluCas9 scaffold sequence (e.g., a scaffold comprising the sequence of SEQ ID NO: 901). In some embodiments, the scaffold sequence comprises one or more alterations in the tetraloop as compared to the tetraloop of a wildtype SluCas9 scaffold sequence (e.g., a scaffold comprising the sequence of SEQ ID NO: 900) or a reference SluCas9 scaffold sequence (e.g., a scaffold comprising the sequence of SEQ ID NO: 901). In some embodiments, the scaffold sequence comprises one or more alterations in the repeat region as compared to the repeat region of a wildtype SluCas9 scaffold sequence (e.g., a scaffold comprising the sequence of SEQ ID NO: 900) or a reference SluCas9 scaffold sequence (e.g., a scaffold comprising the sequence of SEQ ID NO: 901). In some embodiments, the scaffold sequence comprises one or more alterations in the anti-repeat region as compared to the anti-repeat region of a wildtype SluCas9 scaffold sequence (e.g., a scaffold comprising the sequence of SEQ ID NO: 900) or a reference SluCas9 scaffold sequence (e.g., a scaffold comprising the sequence of SEQ ID NO: 901). In some embodiments, the scaffold sequence comprises one or more alterations in the linker region as compared to the linker region of a wildtype SluCas9 scaffold sequence (e.g., a scaffold comprising the sequence of SEQ ID NO: 900) or a reference SluCas9 scaffold sequence (e.g., a scaffold comprising the sequence of SEQ ID NO: 901). See, e.g., Nishimasu et al., 2015, Cell, 162:1113-1126 for description of regions of a scaffold.

[0168] Where a tracrRNA is used, in some embodiments, it comprises (5′ to 3′) a second complementary domain and a proximal domain. In the case of a sgRNA, guide sequences together with additional nucleotides (e.g., SEQ ID Nos: 500-504 (for SaCas9), and 900 or 601, or 901-917 (for SluCas9)) form or encode a sgRNA. In some embodiments, an sgRNA comprises (5′ to 3′) at least a spacer sequence, a first complementary domain, a linking domain, a second complementary domain, and a proximal domain. A sgRNA or tracrRNA may further comprise a tail domain. The linking domain may be hairpin-forming. See, e.g., US 2017/0007679 for detailed discussion and examples of crRNA and gRNA domains, including second complementarity domains, linking domains, proximal domains, and tail domains.

[0169] In some embodiments, the disclosure provides for specific nucleic acid sequences encoding one or more guide RNA components (e.g., any of the spacer and or scaffold sequences disclosed herein). The disclosure contemplates RNA equivalents of any of the DNA sequences provided herein (i.e., in which “T”s are replaced with “U”s), or DNA equivalents of any of the RNA sequences provided herein (i.e., in which “U”s are replaced with “T”s), as well as complements (including reverse complements) of any of the sequences disclosed herein.

[0170] In some embodiments, a composition is provided comprising a guide RNA, or nucleic acid encoding a guide RNA, wherein the guide RNA further comprises a trRNA. In each composition and method embodiment described herein, the crRNA (comprising the spacer sequence) and trRNA may be associated as a single RNA (sgRNA) or may be on separate RNAs (dgRNA). In the context of sgRNAs, the crRNA and trRNA components may be covalently linked, e.g., via a phosphodiester bond or other covalent bond.

### Vectors

[0171] In any embodiment comprising a nucleic acid molecule encoding a guide RNA and/or a Cas9, the nucleic acid molecule may be a vector. In some embodiments, a composition is provided comprising a single nucleic acid molecule encoding at least one guide RNA and Cas9, wherein the nucleic acid molecule is a vector. In some embodiments, a composition is provided comprising more than one nucleic acid molecule encoding a guide RNA and Cas9, wherein the nucleic acid molecule is a vector. In some embodiments, a composition is provided comprising more than one nucleic acid molecule wherein one molecule encodes one or more guide RNA, and the other molecule encodes Cas9 plus or minus at least one guide RNA, wherein the nucleic acid molecule is a vector.

[0172] Any type of vector, such as any of those described herein, may be used. In some embodiments, the vector is a lipid nanoparticle. In some embodiments, the vector is a viral vector. In some embodiments, the viral vector is a non-integrating viral vector (i.e., that does not insert sequence from the vector into a host chromosome). In some embodiments, the viral vector is an adeno-associated virus vector (AAV), a lentiviral vector, an integrase-deficient lentiviral vector, an adenoviral vector, a vaccinia viral vector, an alphaviral vector, or a herpes simplex viral vector. In some embodiments, the vector comprises a muscle-specific promoter. Exemplary muscle-specific promoters include a muscle creatine kinase promoter, a desmin promoter, an MHCK7 promoter, or an SPc5-12 promoter. See US 2004/0175727 A1; Wang et al., Expert Opin Drug Deliv. (2014) 11, 345-364; Wang et al., Gene Therapy (2008) 15, 1489-1499. In some embodiments, the muscle-specific promoter is a CK8 promoter. In some embodiments, the muscle-specific promoter is a CK8e promoter. In any of the foregoing embodiments, the vector may be an adeno-associated virus vector (AAV).

[0173] Where a vector is used, it may be a viral vector, such as a non-integrating viral vector. In some embodiments, the viral vector is an adeno-associated virus vector, a lentiviral vector, an integrase-deficient lentiviral vector, an adenoviral vector, a vaccinia viral vector, an alphaviral vector, or a herpes simplex viral vector. In some embodiments, the viral vector is an adeno-associated virus (AAV) vector. In some embodiments, the AAV vector is an AAV1, AAV2, AAV3, AAV4, AAV5, AAV6, AAV7, AAV8, AAVrh10 (see, e.g., SEQ ID NO: 81 of U.S. Pat. No. 9,790,472, which is incorporated by reference herein in its entirety), AAVrh74 (see, e.g., SEQ ID NO: 1 of US 2015/0111955, which is incorporated by reference herein in its entirety), or AAV9 vector, wherein the number following AAV indicates the AAV serotype. In some embodiments, the AAV vector is a single-stranded AAV (ssAAV). In some embodiments, the AAV vector is a double-stranded AAV (dsAAV). Any variant of an AAV vector or serotype thereof, such as a self-complementary AAV (scAAV) vector, is encompassed within the general terms AAV vector, AAV1 vector, etc. See, e.g., McCarty et al., Gene Ther. 2001; 8:1248-54, Naso et al., BioDrugs 2017; 31:317-334, and references cited therein for detailed discussion of various AAV vectors. In some embodiments, the AAV vector size is measured in length of nucleotides from ITR to ITR, inclusive of both ITRs. In some embodiments, the AAV vector is less than 5 kb in size from ITR to ITR, inclusive of both ITRs. In particular embodiments, the AAV vector is less than 4.9 kb from ITR to ITR in size, inclusive of both ITRs. In further embodiments, the AAV vector is less than 4.85 kb in size from ITR to ITR, inclusive of both ITRs. In further embodiments, the AAV vector is less than 4.8 kb in size from ITR to ITR, inclusive of both ITRs. In further embodiments, the AAV vector is less than 4.75 kb in size from ITR to ITR, inclusive of both ITRs. In further embodiments, the AAV vector is less than 4.7 kb in size from ITR to ITR, inclusive of both ITRs. In some embodiments, the vector is between 3.9-5 kb, 4-5 kb, 4.2-5 kb, 4.4-5 kb, 4.6-5 kb, 4.7-5 kb, 3.9-4.9 kb, 4.2-4.9 kb, 4.4-4.9 kb, 4.7-4.9 kb, 3.9-4.85 kb, 4.2-4.85 kb, 4.4-4.85 kb, 4.6-4.85 kb, 4.7-4.85 kb, 4.7-4.9 kb, 3.9-4.8 kb, 4.2-4.8 kb, 4.4-4.8 kb or 4.6-4.8 kb from ITR to ITR in size, inclusive of both ITRs. In some embodiments, the vector is between 4.4-4.85 kb in size from ITR to ITR, inclusive of both ITRs. In some embodiments, the vector is an AAV9 vector.

[0174] In some embodiments, the vector (e.g., viral vector, such as an adeno-associated viral vector) comprises a tissue-specific (e.g., muscle-specific) promoter, e.g., which is operatively linked to a sequence encoding the guide RNA and/or the Cas protein. In some embodiments, the muscle-specific promoter is a muscle creatine kinase promoter, a desmin promoter, an MHCK7 promoter, or an SPc5-12 promoter. In some embodiments, the muscle-specific promoter is a CK8 promoter. In some embodiments, the muscle-specific promoter is a CK8e promoter. Muscle-specific promoters are described in detail, e.g., in US2004/0175727 A1; Wang et al., Expert Opin Drug Deliv. (2014) 11, 345-364; Wang et al., Gene Therapy (2008) 15, 1489-1499. In some embodiments, the tissue-specific promoter is a neuron-specific promoter, such as an enolase promoter. See, e.g., Naso et al., BioDrugs 2017; 31:317-334; Dashkoff et al., Mol Ther Methods C/in Dev. 2016; 3:16081, and references cited therein for detailed discussion of tissue-specific promoters including neuron-specific promoters.

[0175] In some embodiments, in addition to guide RNA and Cas9 sequences, the vectors further comprise nucleic acids that do not encode guide RNAs. Nucleic acids that do not encode guide RNA and Cas9 include, but are not limited to, promoters, enhancers, and regulatory sequences. In some embodiments, the vector comprises one or more nucleotide sequence(s) encoding a crRNA, a trRNA, or a crRNA and trRNA. In some embodiments, the muscle specific promoter is the CK8 promoter. The CK8 promoter has the following sequence (SEQ ID NO. 700):

| | |
|---|---|
| 1 | CTAGACTAGC ATGCTGCCCA TGTAAGGAGG CAAGGCCTGG GGACACCCGA GATGCCTGGT |
| 61 | TATAATTAAC CCAGACATGT GGCTGCCCCC CCCCCCCCAA CACCTGCTGC CTCTAAAAAT |
| 121 | AACCCTGCAT GCCATGTTCC CGGCGAAGGG CCAGCTGTCC CCCGCCAGCT AGACTCAGCA |
| 181 | CTTAGTTTAG GAACCAGTGA GCAAGTCAGC CCTTGGGGCA GCCCATACAA GGCCATGGGG |
| 241 | CTGGGCAAGC TGCACGCCTG GGTCCGGGGT GGGCACGGTG CCCGGGCAAC GAGCTGAAAG |
| 301 | CTCATCTGCT CTCAGGGGCC CCTCCCTGGG GACAGCCCCT CCTGGCTAGT CACACCCTGT |
| 361 | AGGCTCCTCT ATATAACCCA GGGGCACAGG GGCTGCCCTC ATTCTACCAC CACCTCCACA |
| 421 | GCACAGACAG ACACTCAGGA GCCAGCCAGC |

[0176] In some embodiments, the muscle-cell cell specific promoter is a variant of the CK8 promoter, called CK8e. In some embodiments, the size of the CK8e promoter is 436 bp. The CK8e promoter has the following sequence (SEQ ID NO. 701):

| | |
|---|---|
| 1 | TGCCCATGTA AGGAGGCAAG GCCTGGGGAC ACCCGAGATG CCTGGTTATA ATTAACCCAG |
| 61 | ACATGTGGCT GCCCCCCCCC CCCCAACACC TGCTGCCTCT AAAAATAACC CTGCATGCCA |
| 121 | TGTTCCCGGC GAAGGGCCAG CTGTCCCCCG CCAGCTAGAC TCAGCACTTA GTTTAGGAAC |
| 181 | CAGTGAGCAA GTCAGCCCTT GGGGCAGCCC ATACAAGGCC ATGGGGCTGG GCAAGCTGCA |
| 241 | CGCCTGGGTC CGGGGTGGGC ACGGTGCCCG GGCAACGAGC TGAAAGCTCA TCTGCTCTCA |
| 301 | GGGGCCCCTC CCTGGGGACA GCCCCTCCTG GCTAGTCACA CCCTGTAGGC TCCTCTATAT |
| 361 | AACCCAGGGG CACAGGGGCT GCCCTCATTC TACCACCACC TCCACAGCAC AGACAGACAC |
| 421 | TCAGGAGCCA GCCAGC |

[0177] In some embodiments, the Ck8e promoter comprises a nucleotide sequence that is at least 90%, 91%, 92%, 93%, 94%, 95%, 96%, 97%, 98%, 99% or 100% identical to the sequence of SEQ ID NO: 701.

[0178] In some embodiments, the vector comprises one or more of a U6, H1, or 7SK promoter. In some embodiments, the U6 promoter is the human U6 promoter (e.g., the U6L promoter or U6S promoter). In some embodiments, the promoter is the murine U6 promoter. In some embodiments, the 7SK promoter is a human 7SK promoter. In some embodiments, the 7SK promoter is the 7SK1 promoter. In some embodiments, the 7SK promoter is the 7SK2 promoter. In some embodiments, the H1 promoter is a human H1 promoter (e.g., the H1L promoter or the HIS promoter). In some embodiments, the vector comprises multiple guide sequences, wherein each guide sequence is under the control of a separate promoter. In some embodiments, each of the multiple guide sequences comprises a different sequence. In some embodiments, each of the multiple guide sequences comprise the same sequence (e.g., each of the multiple guide sequences comprise the same spacer sequence). In some embodiments, each of the multiple guide sequences comprises the same spacer sequence and the same scaffold sequence. In some embodiments, each of the multiple guide sequences comprises different spacer sequences and different scaffold sequences. In some embodiments, each of the multiple guide sequences comprises the same spacer sequence, but comprises a different scaffold sequence. In some embodiments, each of the multiple guide sequences comprises different spacer sequences and different scaffold sequences. In some embodiments, each of the separate promoters comprises the same nucleotide sequence (e.g., the U6 promoter sequence). In some embodiments, each of the separate promoters comprises a different nucleotide sequence (e.g., the U6, H1, and/or 7SK promoter sequence).

[0179] In some embodiments, the U6 promoter comprises a nucleotide sequence that is at least 90%, 91%, 92%, 93%, 94%, 95%, 96%, 97%, 98%, 99% or 100% identical to the sequence of SEQ ID NO: 702:

| | |
|---|---|
| cgagtccaac acccgtggga atcccatggg caccatggcc cctcgctcca aaaatgcttt | 60 |
| cgcgtcgcgc agacactgct cggtagtttc ggggatcagc gtttgagtaa gagcccgcgt | 120 |
| ctgaaccctc cgcgccgccc cggccccagt ggaaagacgc gcaggcaaaa cgcaccacgt | 180 |
| gacggagcgt gaccgcgcgc cgagcgcgcg ccaaggtcgg gcaggaagag ggcctatttc | 240 |
| ccatgattcc ttcatatttg catatacgat acaaggctgt tagagagata attagaatta | 300 |
| atttgactgt aaacacaaag atattagtac aaaatacgtg acgtagaaag taataatttc | 360 |
| ttgggtagtt tgcagtttta aaattatgtt ttaaaatgga ctatcatatg cttaccgtaa | 420 |
| cttgaaagta tttcgatttc ttggctttat atatcttgtg gaaaggacga aa | 472 |

[0180] In some embodiments, the H1 promoter comprises a nucleotide sequence that is at least 90%, 91%, 92%, 93%, 94%, 95%, 96%, 97%, 98%, 99% or 100% identical to the sequence of SEQ ID NO: 703:

| | |
|---|---|
| gctcggcgcg cccatatttg catgtcgcta tgtgttctgg gaaatcacca taaacgtgaa | 60 |
| atgtctttgg atttgggaat cttataagtt ctgtatgaga ccacggta | 108 |

[0181] In some embodiments, the 7SK promoter comprises a nucleotide sequence that is at least 90%, 91%, 92%, 93%, 94%, 95%, 96%, 97%, 98%, 99% or 100% identical to the sequence of SEQ ID NO: 704:

| | |
|---|---|
| tgacggcgcg ccctgcagta tttagcatgc cccacccatc tgcaaggcat tctggatagt | 60 |
| gtcaaaacag ccggaaatca agtccgttta tctcaaactt tagcattttg ggaataaatg | 120 |
| atatttgcta tgctggttaa attagatttt agttaaattt cctgctgaag ctctagtacg | 180 |
| ataagtaact tgacctaagt gtaaagttga gatttccttc aggtttatat agcttgtgcg | 240 |
| ccgcctgggt a | 251 |

[0182] In some embodiments, the U6 promoter is a hU6c promoter and comprises a nucleotide sequence that is at least 90%, 91%, 92%, 93%, 94%, 95%, 96%, 97%, 98%, 99% or 100% identical to the sequence of SEQ ID NO: 705:

GAGGGCCTATTTCCCATGATTCCTTCATATTTGCATATACGATACAAGG
CTGTTAGAGAGATAATTGGAATTAATTTGACTGTAAACACAAAGATATT
AGTACAAAATACGTGACGTAGAAAGTAATAATTTCTTGGGTAGTTTGCA
GTTTTAAAATTATGTTTTAAAATGGACTATCATATGCTTACCGTAACTT
GAAAGTATTTCGATTTCTTGGCTTTATATATCTTGTGGAAAGGACGAAA
CACC.

[0183] In some embodiments, the U6 promoter is a variant of the hU6c promoter. In some embodiments, the variant of the hU6c promoter comprises alternative nucleotides as compared to the sequence of SEQ ID NO: 705. In some embodiments, the variant of the hU6c promoter comprises fewer nucleotides as compared to the 249 nucleotides of SEQ ID NO: 705. In some embodiments, the variant of the hU6c promoter has fewer nucleotides in the nucleosome binding sequence of the hU6c promoter of SEQ ID NO: 705. In some embodiments, the variant of the hU6c promoter lacks all of or at least a portion of (e.g., at least 5, 10, 15, 20, 25, or 30 nucleotides) the nucleotides corresponding to nucleotides 96-125 of SEQ ID NO: 705. In some embodiments, the variant of the hU6c promoter lacks all of or at least a portion of (e.g., at least 5, 10, 15, 20, 25, 30, 35, 40, 45, 50, 55, or 60 nucleotides) the nucleotides corresponding to nucleotides 81-140 of SEQ ID NO: 705. In some embodiments, the variant of the hU6c promoter lacks all of or at least a portion of (e.g., at least 10, 20, 30, 40, 50, 60, 65, 70, 75, 80, or 85 nucleotides) the nucleotides corresponding to nucleotides 66-150 of SEQ ID NO: 705. In some embodiments, the variant of the hU6c promoter lacks all of or at least a portion of (e.g., at least 10, 20, 30, 40, 50, 60, 70, 80, 90, 100, 110, or 120 nucleotides) the nucleotides corresponding to nucleotides 51-170 of SEQ ID NO: 705. In some embodiments, the variant of the hU6c promoter lacks the nucleotides corresponding to nucleotides 96-125 of SEQ ID NO: 705. In some embodiments, the variant of the hU6c promoter comprises 129-219 nucleotides. In some embodiments, the variant of the hU6c promoter comprises 219 nucleotides. In some embodiments, the variant of the hU6c promoter comprises 189 nucleotides. In some embodiments, the variant of the hU6c promoter comprises 159 nucleotides. In some embodiments, the variant of the hU6c promoter comprises 129 nucleotides.

[0184] In some embodiments, the U6 promoter is hU6d30 and comprises a nucleotide sequence that is at least 90%, 91%, 92%, 93%, 94%, 95%, 96%, 97%, 98%, 99% or 100% identical to the sequence of SEQ ID NO: 9001:

GAGGGCCTATTTCCCATGATTCCTTCATATTTGCATATACGATACAAGG
CTGTTAGAGAGATAATTGGAATTAATTTGACTGTAAACACAAAGATATA
ATTTCTTGGGTAGTTTGCAGTTTTAAAATTATGTTTTAAAATGGACTAT
CATATGCTTACCGTAACTTGAAAGTATTTCGATTTCTTGGCTTTATATA
TCTTGTGGAAAGGACGAAACACC.

[0185] In some embodiments, the U6 promoter is hU6d60 and comprises a nucleotide sequence that is at least 90%, 91%, 92%, 93%, 94%, 95%, 96%, 97%, 98%, 99% or 100% identical to the sequence of SEQ ID NO: 9002:

GAGGGCCTATTTCCCATGATTCCTTCATATTTGCATATACGATACAAGG
CTGTTAGAGAGATAATTGGAATTAATTTGACGTTTGCAGTTTTAAAATT
ATGTTTTAAAATGGACTATCATATGCTTACCGTAACTTGAAAGTATTTC
GATTTCTTGGCTTTATATATCTTGTGGAAAGGACGAAACACC.

[0186] In some embodiments, the U6 promoter is hU6d90 and comprises a nucleotide sequence that is at least 90%, 91%, 92%, 93%, 94%, 95%, 96%, 97%, 98%, 99% or 100% identical to the sequence of SEQ ID NO: 9003:

GAGGGCCTATTTCCCATGATTCCTTCATATTTGCATATACGATACAAGG
CTGTTAGAGAGATAATATTATGTTTTAAAATGGACTATCATATGCTTAC
CGTAACTTGAAAGTATTTCGATTTCTTGGCTTTATATATCTTGTGGAAA
GGACGAAACACC.

[0187] In some embodiments, the U6 promoter is hU6d120 and comprises a nucleotide sequence that is at least 90%, 91%, 92%, 93%, 94%, 95%, 96%, 97%, 98%, 99% or 100% identical to the sequence of SEQ ID NO: 9004:

GAGGGCCTATTTCCCATGATTCCTTCATATTTGCATATACGATACAAGG
CGGACTATCATATGCTTACCGTAACTTGAAAGTATTTCGATTTCTTGGC
TTTATATATCTTGTGGAAAGGACGAAACACC.

[0188] In some embodiments, the 7SK promoter is a 7SK2 promoter and comprises a nucleotide sequence that is at least 90%, 91%, 92%, 93%, 94%, 95%, 96%, 97%, 98%, 99% or 100% identical to the sequence of SEQ ID NO: 706:

CTGCAGTATTTAGCATGCCCCACCCATCTGCAAGGCATTCTGGATAGTG
TCAAAACAGCCGGAAATCAAGTCCGTTTATCTCAAACTTTAGCATTTTG
GGAATAAATGATATTTGCTATGCTGGTTAAATTAGATTTTAGTTAAATT
TCCTGCTGAAGCTCTAGTACGATAAGCAACTTGACCTAAGTGTAAAGTT
GAGACTTCCTTCAGGTTTATATAGCTTGTGCGCCGCTTGGGTACCTC.

[0189] In some embodiments, the 7SK promoter is a variant of the 7SK2 promoter. In some embodiments, the variant of the 7SK2 promoter comprises alternative nucleotides as compared to the sequence of SEQ ID NO: 706. In some embodiments, the variant of the 7SK2 promoter e.g., comprises fewer nucleotides as compared to the 243 nucleotides of SEQ ID NO: 706. In some embodiments, the variant of the 7SK2 promoter has fewer nucleotides in the nucleosome binding sequence of the 7SK2 promoter of SEQ ID NO: 706. In some embodiments, the variant of the 7SK2 promoter lacks all of or at least a portion of (e.g., at least 5, 10, 15, 20, 25, or 30 nucleotides) the nucleotides corresponding to nucleotides 95-124 of SEQ ID NO: 706. In some embodiments, the variant of the 7SK2 promoter lacks all of or at least a portion of (e.g., at least 5, 10, 15, 20, 25, 30, 35, 40, 45, 50, 55, or 60 nucleotides) the nucleotides corresponding to nucleotides 81-140 of SEQ ID NO: 706. In some embodiments, the variant of the 7SK2 promoter lacks all of or at least a portion of (e.g., at least 10, 20, 30, 40, 50, 60, 65, 70, 75, 80, 85 or 90 nucleotides) the nucleotides corresponding to nucleotides 67-156 of SEQ ID NO: 706. In some embodiments, the variant of the 7SK2 promoter lacks all of or at least a portion of (e.g., at least 10, 20, 30, 40, 50, 60, 70, 80, 90, 100, 110, or 120 nucleotides) the nucleotides corresponding to nucleotides 52-171 of SEQ ID NO: 706. In some embodiments, the variant of the 7SK2 promoter comprises 123-213 nucleotides. In some embodiments, the variant of the 7SK2 promoter comprises 213 nucleotides. In some embodiments, the variant of the 7SK2 promoter comprises 183 nucleotides. In some embodiments, the variant of the 7SK2 promoter comprises 153 nucleotides. In some embodiments, the variant of the 7SK2 promoter comprises 123 nucleotides.

[0190] In some embodiments, the 7SK promoter is 7SKd30 and comprises a nucleotide sequence that is at least 90%, 91%, 92%, 93%, 94%, 95%, 96%, 97%, 98%, 99% or 100% identical to the sequence of SEQ ID NO: 9006:

CTGCAGTATTTAGCATGCCCCACCCATCTGCAAGGCATTCTGGATAGTG
TCAAAACAGCCGGAAATCAAGTCCGTTTATCTCAAACTTTAGCATTTAA
ATTAGATTTTAGTTAAATTTCCTGCTGAAGCTCTAGTACGATAAGCAAC
TTGACCTAAGTGTAAAGTTGAGACTTCCTTCAGGTTTATATAGCTTGTG
CGCCGCTTGGGTACCTC.

[0191] In some embodiments, the 7SK promoter is 7SKd60 and comprises a nucleotide sequence that is at least 90%, 91%, 92%, 93%, 94%, 95%, 96%, 97%, 98%, 99% or 100% identical to the sequence of SEQ ID NO: 9007:

CTGCAGTATTTAGCATGCCCCACCCATCTGCAAGGCATTCTGGATAGTG
TCAAAACAGCCGGAAATCAAGTCCGTTTATCTTAAATTTCCTGCTGAAG
CTCTAGTACGATAAGCAACTTGACCTAAGTGTAAAGTTGAGACTTCCTT
CAGGTTTATATAGCTTGTGCGCCGCTTGGGTACCTC.

[0192] In some embodiments, the 7SK promoter is 7SKd90 and comprises a nucleotide sequence that is at least 90%, 91%, 92%, 93%, 94%, 95%, 96%, 97%, 98%, 99% or 100% identical to the sequence of SEQ ID NO: 9008:

CTGCAGTATTTAGCATGCCCCACCCATCTGCAAGGCATTCTGGATAGTG
TCAAAACAGCCGGAAATAGCTCTAGTACGATAAGCAACTTGACCTAAGT
GTAAAGTTGAGACTTCCTTCAGGTTTATATAGCTTGTGCGCCGCTTGGG
TACCTC.

[0193] In some embodiments, the 7SK promoter is 7SKd120 and comprises a nucleotide sequence that is at least 90%, 91%, 92%, 93%, 94%, 95%, 96%, 97%, 98%, 99% or 100% identical to the sequence of SEQ ID NO: 9009:

[0194] CTGCAGTATTTAGCATGCCCCACCCATCTGCAAGGCATTCTGGATAGTGTCAG CAACTTGACCTAAGTGTAAAGTTGAGACTTCCTTCAGGTTTATATAGCTTGTGCGCCGCTT GGGTACCTC. In some embodiments, the H1 promoter is a HIm or mHI promoter and comprises a nucleotide sequence that is at least 90%, 91%, 92%, 93%, 94%, 95%, 96%, 97%, 98%, 99% or 100% identical to the sequence of SEQ ID NO: 707:

AATATTTGCATGTCGCTATGTGTTCTGGGAAATCACCATAAACGTGAAA
TGTCTTTGGATTTGGGAATCTTATAAGTTCTGTATGAGACCACTCTTTC
CC.

[0195] In some embodiments, the promoter is an M 11 promoter and comprises a nucleotide sequence that is at least 90%, 91%, 92%, 93%, 94%, 95%, 96%, 97%, 98%, 99% or 100% identical to the sequence of SEQ ID NO: 708:

ATATTTAGCATGTCGCTATGTGTTCTGGGAAACTTGACCTAAGTGTAAA
GTTGAGATTTCCTTCAGGTTTATATAGTTCTGTATGAGACCACTCTTTC
CC.

[0196] In some embodiments, the vector comprises multiple inverted terminal repeats (ITRs). These ITRs may be of an AAV1, AAV2, AAV3, AAV4, AAV5, AAV6, AAV7, AAV8, or AAV9 serotype. In some embodiments, the ITRs are of an AAV2 serotype. In some embodiments, the 5′ ITR comprises a sequence that is at least 80%, 85%, 90%, 91%, 92%, 93%, 94%, 95%, 96%, 97%, 98%, 99%, or 100% identical to the sequence of SEQ ID NO: 709:

GGCCACTCCCTCTCTGCGCGCTCGCTCGCTCACTGAGGCCGGGCGACCA
AAGGTCGCCCGACGCCCGGGCTTTGCCCGGGCGGCCTCAGTGAGCGAGC
GAGCGCGCAGAGAGGGAGTGGCCAACTCCATCACTAGGGGTTCCT.

[0197] In some embodiments, the 5′ ITR comprises a sequence that is at least 80%, 85%, 90%, 91%, 92%, 93%, 94%, 95%, 96%, 97%, 98%, 99%, or 100% identical to the sequence of SEQ ID NO: 6:

CGGCCACTCCCTCTCTGCGCGCTCGCTCGCTCACTGAGGCCGGGCGACC
AAAGGTCGCCCGACGCCCGGGCTTTGCCCGGGCGGCCTCAGTGAGCGAG
CGAGCGCGCAGAGAGGGAGTGGCCAACTCCATCACTAGGGGTTCCT.

[0198] In some embodiments, the 3′ITR comprises a sequence that is at least 80%, 85%, 90%, 91%, 92%, 93%, 94%, 95%, 96%, 97%, 98%, 99%, or 100% identical to the sequence of SEQ ID NO: 710:

AGGAACCCCTAGTGATGGAGTTGGCCACTCCCTCTCTGCGCGCTCGCTC
GCTCACTGAGGCCGGGCGACCAAAGGTCGCCCGACGCCCGGGCTTTGCC
CGGGCGGCCTCAGTGAGCGAGCGAGCGCGCAGAGAGGGA.

[0199] In some embodiments, the 3′ ITR comprises a sequence that is at least 80%, 85%, 90%, 91%, 92%, 93%, 94%, 95%, 96%, 97%, 98%, 99%, or 100% identical to the sequence of SEQ ID NO: 7:

AGGAACCCCTAGTGATGGAGTTGGCCACTCCCTCTCTGCGCGCTCGCTC
GCTCACTGAGGCCGGGCGACCAAAGGTCGCCCGACGCCCGGGCTTTGCC
CGGGCGGCCTCAGTGAGCGAGCGAGCGCGCAGAGAGGGAA.

[0200] In some embodiments, a vector comprising a single nucleic acid molecule encoding 1) two or more guide RNA comprising any one or more of the spacer sequences of Table 2; and 2) a SaCas9 (for any one or more of SEQ ID Nos: 11-15 or 27-69) or SluCas9 (for any one or more of SEQ ID NO: 243-269) is provided. In some embodiments, the vector is an AAV vector. In some embodiments, the AAV vector is administered to a subject to treat DMD. In some embodiments, only one vector is needed due to the use of a particular guide sequence that is useful in the context of SaCas9 or SluCas9.

[0201] In some embodiments, the vector comprises a nucleic acid encoding a Cas9 protein (e.g., an SaCas9 or SluCas9 protein) and further comprises a nucleic acid encoding one or more single guide RNA(s). In some embodiments, the nucleic acid encoding the Cas9 protein is under the control of a CK8e promoter. In some embodiments, the nucleic acid encoding the guide RNA sequence is under the control of a hU6c promoter. In some embodiments, the vector is AAV9.

[0202] In some embodiments, the vector comprises multiple nucleic acids encoding more than one guide RNA. In some embodiments, the vector comprises two nucleic acids encoding two different guide RNA sequences.

[0203] In some embodiments, the vector comprises a nucleic acid encoding a Cas9 protein (e.g., an SaCas9 protein or SluCas9 protein), a nucleic acid encoding a first guide RNA, and a nucleic acid encoding a second guide RNA. In some embodiments, the vector does not comprise a nucleic acid encoding more than two guide RNAs. In some embodiments, the nucleic acid encoding the first guide RNA is the same as the nucleic acid encoding the second guide RNA. In some embodiments, the nucleic acid encoding the first guide RNA is different from the nucleic acid encoding the second guide RNA. In some embodiments, the vector comprises a single nucleic acid molecule, wherein the single nucleic acid molecule comprises a nucleic acid encoding a Cas9 protein, a nucleic acid encoding a first guide RNA, and a nucleic acid that is the reverse complement to the coding sequence for the second guide RNA. In some embodiments, the vector comprises a single nucleic acid molecule, wherein the single nucleic acid molecule comprises a nucleic acid encoding a Cas9 protein, a nucleic acid that is the reverse complement to the coding sequence for the first guide RNA, and a nucleic acid that is the reverse complement to the coding sequence for the second guide RNA. In some embodiments, the nucleic acid encoding a Cas9 protein (e.g., an SaCas9 or SluCas9 protein) is under the control of the CK8e promoter. In some embodiments, the first guide is under the control of the hU6c promoter and the second guide is under the control of the hU6c promoter. In some embodiments, the first guide is under the control of the 7SK2 promoter, and the second guide is under the control of the H1m promoter. In some embodiments, the first guide is under the control of the H1m promoter, and the second guide is under the control of the 7SK2 promoter. In some embodiments, the first guide is under the control of the hU6c promoter, and the second guide is under the control of the H1m promoter. In some embodiments, the first guide is under the control of the H1m promoter, and the second guide is under the control of the hU6c promoter. In some embodiments, the nucleic acid encoding the Cas9 protein is: a) between the nucleic acids encoding the guide RNAs, b) between the nucleic acids that are the reverse complement to the coding sequences for the guide RNAs, c) between the nucleic acid encoding the first guide RNA and the nucleic acid that is the reverse complement to the coding sequence for the second guide RNA, d) between the nucleic acid encoding the second guide RNA and the nucleic acid that is the reverse complement to the coding sequence for the first guide RNA, e) 5′ to the nucleic acids encoding the guide RNAs, f) 5′ to the nucleic acids that are the reverse complements to the coding sequences for the guide RNAs, g) 5′ to a nucleic acid encoding one of the guide RNAs and 5′ to a nucleic acid that is the reverse complement to the coding sequence for the other guide RNA, h) 3′ to the nucleic acids encoding the guide RNAs, i) 3′ to the nucleic acids that are the reverse complements to the coding sequences for the guide RNAs, or j) 3′ to a nucleic acid encoding one of the guide RNAs and 3′ to a nucleic acid that is the reverse complement to the coding sequence for the other guide RNA. In some embodiments, any of the vectors disclosed herein is AAV9. In preferred embodiments, the AAV9 vector is less than 5 kb from ITR to ITR in size, inclusive of both ITRs. In particular embodiments, the AAV9 vector is less than 4.9 kb from ITR to ITR in size, inclusive of both ITRs. In further embodiments, the AAV9 vector is less than 4.85 kb from ITR to ITR in size, inclusive of both ITRs. In further embodiments, the AAV9 vector is less than 4.8 kb from ITR to ITR in size, inclusive of both ITRs. In further embodiments, the AAV9 vector is less than 4.75 kb from ITR to ITR in size, inclusive of both ITRs. In further embodiments, the AAV9 vector is less than 4.7 kb from ITR to ITR in size, inclusive of both ITRs. In some embodiments, the vector is between 3.9-5 kb, 4-5 kb, 4.2-5 kb, 4.4-5 kb, 4.6-5 kb, 4.7-5 kb, 3.9-4.9 kb, 4.2-4.9 kb, 4.4-4.9 kb, 4.7-4.9 kb, 3.9-4.85 kb, 4.2-4.85 kb, 4.4-4.85 kb, 4.6-4.85 kb, 4.7-4.85 kb, 4.7-4.9 kb, 3.9-4.8 kb, 4.2-4.8 kb, 4.4-4.8 kb or 4.6-4.8 kb from ITR to ITR in size, inclusive of both ITRs. In some embodiments, the vector is between 4.4-4.85 kb from ITR to ITR in size, inclusive of both ITRs. In some embodiments, the vector is an AAV9 vector.

[0204] In some embodiments, any of the vectors disclosed herein comprises a nucleic acid encoding at least a first guide RNA and a second guide RNA. In some embodiments, the nucleic acid comprises a spacer-encoding sequence for the first guide RNA, a scaffold-encoding sequence for the first guide RNA, a spacer-encoding sequence for the second guide RNA, and a scaffold-encoding sequence of the second guide RNA. In some embodiments, the spacer-encoding sequence (e.g., encoding any of the spacer sequences disclosed herein) for the first guide RNA is identical to the spacer-encoding sequence for the second guide RNA. In some embodiments, the spacer-encoding sequence (e.g., encoding any of the spacer sequences disclosed herein) for the first guide RNA is different from the spacer-encoding sequence for the second guide RNA. In some embodiments, the scaffold-encoding sequence for the first guide RNA is identical to the scaffold-encoding sequence for the second guide RNA. In some embodiments, the scaffold-encoding sequence for the first guide RNA is different from the scaffold-encoding sequence for the nucleic acid encoding the second guide RNA. In some embodiments, the scaffold-encoding sequence for the first guide RNA comprises a sequence selected from the group consisting of SEQ ID Nos: 500-504 (for SaCas9) and 601 or 900-917 (for SluCas9), and the scaffold-encoding sequence for the second guide RNA comprises a different sequence selected from the group consisting of SEQ ID Nos: 500-504 (for SaCas9) and 601 or 900-917 (for SluCas9). In some embodiments, the scaffold-encoding sequence for the first guide RNA comprises the sequence of SEQ ID NO: 500, and the scaffold-encoding sequence for the second guide RNA comprises the sequence of SEQ ID NO: 501. In some embodiments, the scaffold-encoding sequence for the first guide RNA comprises the sequence of SEQ ID NO: 500, and the scaffold-encoding sequence for the second guide RNA comprises the sequence of SEQ ID NO: 502. In some embodiments, the scaffold-encoding sequence for the first guide RNA comprises the sequence of SEQ ID NO: 500, and the scaffold-encoding sequence for the second guide RNA comprises the sequence of SEQ ID NO: 503. In some embodiments, the scaffold-encoding sequence for the first guide RNA comprises the sequence of SEQ ID NO: 500, and the scaffold-encoding sequence for the second guide RNA comprises the sequence of SEQ ID NO: 504. In some embodiments, the scaffold-encoding sequence for the first guide RNA comprises the sequence of SEQ ID NO: 501, and the scaffold-encoding sequence for the second guide RNA comprises the sequence of SEQ ID NO: 502. In some embodiments, the scaffold-encoding sequence for the first guide RNA comprises the sequence of SEQ ID NO: 501, and the scaffold-encoding sequence for the second guide RNA comprises the sequence of SEQ ID NO: 503. In some embodiments, the scaffold-encoding sequence for the first guide RNA comprises the sequence of SEQ ID NO: 501, and the scaffold-encoding sequence for the second guide RNA comprises the sequence of SEQ ID NO: 504. In some embodiments, the scaffold-encoding sequence for the first guide RNA comprises the sequence of SEQ ID NO: 502, and the scaffold-encoding sequence for the second guide RNA comprises the sequence of SEQ ID NO: 503. In some embodiments, the scaffold-encoding sequence for the first guide RNA comprises the sequence of SEQ ID NO: 502, and the scaffold-encoding sequence for the second guide RNA comprises the sequence of SEQ ID NO: 504. In some embodiments, the scaffold-encoding sequence for the first guide RNA comprises the sequence of SEQ ID NO: 503, and the scaffold-encoding sequence for the second guide RNA comprises the sequence of SEQ ID NO: 504. In particular embodiments, the scaffold-encoding sequence for the first guide RNA comprises the sequence of SEQ ID NO: 504, and the scaffold-encoding sequence for the second guide RNA comprises the sequence of SEQ ID NO: 504. In some embodiments, the scaffold-encoding sequence for the first guide RNA comprises the sequence of SEQ ID NO: 600, and the scaffold-encoding sequence for the second guide RNA comprises the sequence of SEQ ID NO: 900. In some embodiments, the scaffold-encoding sequence for the first guide RNA comprises the sequence of SEQ ID NO: 600, and the scaffold-encoding sequence for the second guide RNA comprises the sequence of SEQ ID NO: 901. In some embodiments, the scaffold-encoding sequence for the first guide RNA comprises the sequence of SEQ ID NO: 600, and the scaffold-encoding sequence for the second guide RNA comprises the sequence of SEQ ID NO: 902. In some embodiments, the scaffold-encoding sequence for the first guide RNA comprises the sequence of SEQ ID NO: 600, and the scaffold-encoding sequence for the second guide RNA comprises the sequence of SEQ ID NO: 903. In some embodiments, the scaffold-encoding sequence for the first guide RNA comprises the sequence of SEQ ID NO: 600, and the scaffold-encoding sequence for the second guide RNA comprises the sequence of SEQ ID NO: 904. In some embodiments, the scaffold-encoding sequence for the first guide RNA comprises the sequence of SEQ ID NO: 600, and the scaffold-encoding sequence for the second guide RNA comprises the sequence of SEQ ID NO: 905. In some embodiments, the scaffold-encoding sequence for the first guide RNA comprises the sequence of SEQ ID NO: 600, and the scaffold-encoding sequence for the second guide RNA comprises the sequence of SEQ ID NO: 906. In some embodiments, the scaffold-encoding sequence for the first guide RNA comprises the sequence of SEQ ID NO: 600, and the scaffold-encoding sequence for the second guide RNA comprises the sequence of SEQ ID NO: 907. In some embodiments, the scaffold-encoding sequence for the first guide RNA comprises the sequence of SEQ ID NO: 600, and the scaffold-encoding sequence for the second guide RNA comprises the sequence of SEQ ID NO: 908. In some embodiments, the scaffold-encoding sequence for the first guide RNA comprises the sequence of SEQ ID NO: 600, and the scaffold-encoding sequence for the second guide RNA comprises the sequence of SEQ ID NO: 909. In some embodiments, the scaffold-encoding sequence for the first guide RNA comprises the sequence of SEQ ID NO: 600, and the scaffold-encoding sequence for the second guide RNA comprises the sequence of SEQ ID NO: 910. In some embodiments, the scaffold-encoding sequence for the first guide RNA comprises the sequence of SEQ ID NO: 600, and the scaffold-encoding sequence for the second guide RNA comprises the sequence of SEQ ID NO: 911. In some embodiments, the scaffold-encoding sequence for the first guide RNA comprises the sequence of SEQ ID NO: 600, and the scaffold-encoding sequence for the second guide RNA comprises the sequence of SEQ ID NO: 912. In some embodiments, the scaffold-encoding sequence for the first guide RNA comprises the sequence of SEQ ID NO: 600, and the scaffold-encoding sequence for the second guide RNA comprises the sequence of SEQ ID NO: 913. In some embodiments, the scaffold-encoding sequence for the first guide RNA comprises the sequence of SEQ ID NO: 600, and the scaffold-encoding sequence for the second guide RNA comprises the sequence of SEQ ID NO: 914. In some embodiments, the scaffold-encoding sequence for the first guide RNA comprises the sequence of SEQ ID NO: 600, and the scaffold-encoding sequence for the second guide RNA comprises the sequence of SEQ ID NO: 915. In some embodiments, the scaffold-encoding sequence for the first guide RNA comprises the sequence of SEQ ID NO: 600, and the scaffold-encoding sequence for the second guide RNA comprises the sequence of SEQ ID NO: 916. In some embodiments, the scaffold-encoding sequence for the first guide RNA comprises the sequence of SEQ ID NO: 600, and the scaffold-encoding sequence for the second guide RNA comprises the sequence of SEQ ID NO: 917. In some embodiments, the scaffold-encoding sequence for the first guide RNA comprises the sequence of SEQ ID NO: 901, and the scaffold-encoding sequence for the second guide RNA comprises the sequence of SEQ ID NO: 902. In some embodiments, the scaffold-encoding sequence for the first guide RNA comprises the sequence of SEQ ID NO: 901, and the scaffold-encoding sequence for the second guide RNA comprises the sequence of SEQ ID NO: 903. In some embodiments, the scaffold-encoding sequence for the first guide RNA comprises the sequence of SEQ ID NO: 901, and the scaffold-encoding sequence for the second guide RNA comprises the sequence of SEQ ID NO: 904. In some embodiments, the scaffold-encoding sequence for the first guide RNA comprises the sequence of SEQ ID NO: 901, and the scaffold-encoding sequence for the second guide RNA comprises the sequence of SEQ ID NO: 905. In some embodiments, the scaffold-encoding sequence for the first guide RNA comprises the sequence of SEQ ID NO: 901, and the scaffold-encoding sequence for the second guide RNA comprises the sequence of SEQ ID NO: 906. In some embodiments, the scaffold-encoding sequence for the first guide RNA comprises the sequence of SEQ ID NO: 901, and the scaffold-encoding sequence for the second guide RNA comprises the sequence of SEQ ID NO: 907. In some embodiments, the scaffold-encoding sequence for the first guide RNA comprises the sequence of SEQ ID NO: 901, and the scaffold-encoding sequence for the second guide RNA comprises the sequence of SEQ ID NO: 908. In some embodiments, the scaffold-encoding sequence for the first guide RNA comprises the sequence of SEQ ID NO: 901, and the scaffold-encoding sequence for the second guide RNA comprises the sequence of SEQ ID NO: 909. In some embodiments, the scaffold-encoding sequence for the first guide RNA comprises the sequence of SEQ ID NO: 901, and the scaffold-encoding sequence for the second guide RNA comprises the sequence of SEQ ID NO: 910. In some embodiments, the scaffold-encoding sequence for the first guide RNA comprises the sequence of SEQ ID NO: 901, and the scaffold-encoding sequence for the second guide RNA comprises the sequence of SEQ ID NO: 911. In some embodiments, the scaffold-encoding sequence for the first guide RNA comprises the sequence of SEQ ID NO: 901, and the scaffold-encoding sequence for the second guide RNA comprises the sequence of SEQ ID NO: 912. In some embodiments, the scaffold-encoding sequence for the first guide RNA comprises the sequence of SEQ ID NO: 901, and the scaffold-encoding sequence for the second guide RNA comprises the sequence of SEQ ID NO: 913. In some embodiments, the scaffold-encoding sequence for the first guide RNA comprises the sequence of SEQ ID NO: 901, and the scaffold-encoding sequence for the second guide RNA comprises the sequence of SEQ ID NO: 914. In some embodiments, the scaffold-encoding sequence for the first guide RNA comprises the sequence of SEQ ID NO: 901, and the scaffold-encoding sequence for the second guide RNA comprises the sequence of SEQ ID NO: 915. In some embodiments, the scaffold-encoding sequence for the first guide RNA comprises the sequence of SEQ ID NO: 901, and the scaffold-encoding sequence for the second guide RNA comprises the sequence of SEQ ID NO: 916. In some embodiments, the scaffold-encoding sequence for the first guide RNA comprises the sequence of SEQ ID NO: 901, and the scaffold-encoding sequence for the second guide RNA comprises the sequence of SEQ ID NO: 917. In particular embodiments, the scaffold-encoding sequence for the first guide RNA comprises the sequence of SEQ ID NO: 901, and the scaffold-encoding sequence for the second guide RNA comprises the sequence of SEQ ID NO: 901. In some embodiments, the spacer encoding sequence for the first guide RNA is the same as the spacer-encoding sequence in the second guide RNA, and the scaffold-encoding sequence for the first guide RNA is different from the scaffold-encoding sequence in the nucleic acid encoding the second guide RNA.

[0205] In some embodiments, the AAV vector is in a particular configuration. Some examples of these AAV vector configurations are provided herein, and the order of elements in these exemplary vectors are referenced in a 5′ to 3′ manner with respect to the plus strand. For these configurations, it should be understood that the recited elements may not be directly contiguous, and that one or more nucleotides or one or more additional elements may be present between the recited elements. However, in some embodiments, it is possible that no nucleotides or no additional elements are present between the recited elements. Also, unless otherwise stated, “a promoter for expression of element X” means that the promoter is oriented in a manner to facilitate expression of the recited element X. In addition, unless otherwise stated, references to an “sgRNA scaffold sequence” or “a guide RNA scaffold sequence” are synonymous with “a nucleotide sequence/nucleic acid encoding an sgRNA scaffold sequence” or “a nucleotide sequence/nucleic acid encoding a guide RNA scaffold sequence.” In some embodiments, the disclosure provides for a nucleic acid encoding an SaCas9 (e.g., an SaCas9-KKH) or SluCas9. In some embodiments, the nucleic acid encodes for one or more nuclear localization signals (e.g., the SV40 NLS and/or the c-Myc NLS) on the C-terminus of the encoded SaCas9 or SluCas9. In some embodiments, the nucleic acid encodes for one or more NLSs (e.g., the SV40 NLS and/or the c-Myc NLS) on the C-terminus of the encoded SaCas9 or SluCas9, and the nucleic acid does not encode for an NLS on the N-terminus of the encoded SaCas9 or SluCas9. In some embodiments, the nucleic acid encodes for one or more nuclear localization signals (e.g., the SV40 NLS and/or the c-Myc NLS) on the N-terminus of the encoded SaCas9 or SluCas9. In some embodiments, the nucleic acid encodes for one or more NLSs (e.g., the SV40 NLS and/or the c-Myc NLS) on the N-terminus of the encoded SaCas9 or SluCas9, and the nucleic acid does not encode for an NLS on the C-terminus of the encoded SaCas9 or SluCas9. In some embodiments, the nucleic acid encodes for one or more nuclear localization signals (e.g., the SV40 NLS and/or the c-Myc NLS) on the C-terminus of the encoded SaCas9 or SluCas9 and also encodes for one or more NLSs on the N-terminus of the encoded SaCas9 or SluCas9 (e.g., the SV40 NLS and/or the c-Myc NLS). In some embodiments, the nucleic acid encodes one NLS. In some embodiments, the nucleic acid encodes two NLSs. In some embodiments, the nucleic acid encodes three NLSs. The one, two, or three NLS may all be C-terminal, N-terminal, or any combination of C- and N-terminal. The NLS may be fused/attached directly to the C- or N-terminus or to another NLS, or may be fused/attached indirectly attached through a linker. In some embodiments, an additional domain may be: a) fused to the N- or C-terminus of the Cas protein (e.g., a Cas9 protein), b) fused to the N-terminus of an NLS fused to the N-terminus of a Cas protein, or c) fused to the C-terminus of an NLS fused to the C-terminus of a Cas protein, with or without a linker. In some embodiments, an NLS is fused to the N- and/or C-terminus of the Cas protein by means of a linker. In some embodiments, an NLS is fused to the N-terminus of an N-terminally-fused NLS on a Cas protein by means of a linker, and/or an NLS is fused to the C-terminus of a C-terminally fused NLS on a Cas protein by means of a linker. In some embodiments, the linker is GSVD (SEQ ID NO: 550) or GSGS (SEQ ID NO: 551). In some embodiments, the Cas protein comprises a c-Myc NLS fused to the N-terminus of the Cas protein (or to an N-terminally-fused NLS on the Cas protein), optionally by means of a linker. In some embodiments, the Cas protein comprises an SV40 NLS fused to the C-terminus of the Cas protein (or to a C-terminally-fused NLS on the Cas protein), optionally by means of a linker. In some embodiments, the Cas protein comprises a nucleoplasmin NLS fused to the C-terminus of the Cas protein (or to a C-terminally-fused NLS on the Cas protein), optionally by means of a linker. In some embodiments, the Cas protein comprises: a) a c-Myc NLS fused to the N-terminus of the Cas protein, optionally by means of a linker, b) an SV40 NLS fused to the C-terminus of the Cas protein, optionally by means of a linker, and c) a nucleoplasmin NLS fused to the C-terminus of the SV40 NLS, optionally by means of a linker. In some embodiments, the Cas protein comprises: a) a c-Myc NLS fused to the N-terminus of the Cas protein, optionally by means of a linker, b) a nucleoplasmin NLS fused to the C-terminus of the Cas protein, optionally by means of a linker, and c) an SV40 NLS fused to the C-terminus of the nucleoplasmin NLS, optionally by means of a linker. In some embodiments, a c-myc NLS is fused to the N-terminus of the Cas and an SV40 NLS and/or nucleoplasmin NLS is fused to the C-terminus of the Cas. In some embodiments, a c-myc NLS is fused to the N-terminus of the Cas (e.g., by means of a linker such as GSVD), an SV40 NLS is fused to the C-terminus of the Cas (e.g., by means of a linker such as GSGS), and a nucleoplasmin NLS is fused to the C-terminus of the SV-40 NLS (e.g., by means of a linker such as GSGS).

[0206] In some embodiments, the AAV vector comprises from 5′ to 3′ with respect to the plus strand: the reverse complement of a first sgRNA scaffold sequence, the reverse complement of a nucleic acid encoding a first sgRNA guide sequence, the reverse complement of a promoter for expression of the nucleic acid encoding the first sgRNA, a promoter for expression of a nucleic acid encoding SaCas9 (e.g., CK8e), a nucleic acid encoding SaCas9, a polyadenylation sequence, a promoter for expression of a second sgRNA, a second sgRNA guide sequence, and a second sgRNA scaffold sequence. In some embodiments the promoter for expression of the nucleic acid encoding the first sgRNA is any of the hU6c promoters disclosed herein. In some embodiments the promoter for expression of the nucleic acid encoding the first sgRNA comprises SEQ ID NO: 705. In some embodiments the promoter for expression of the nucleic acid encoding the first sgRNA comprises SEQ ID NO: 9001. In some embodiments the promoter for expression of the nucleic acid encoding the first sgRNA comprises SEQ ID NO: 9002. In some embodiments the promoter for expression of the nucleic acid encoding the first sgRNA comprises SEQ ID NO: 9003. In some embodiments the promoter for expression of the nucleic acid encoding the first sgRNA comprises SEQ ID NO: 9004. In some embodiments the promoter for expression of the nucleic acid encoding the first sgRNA is any of the 7SK2 promoters disclosed herein. In some embodiments the promoter for expression of the nucleic acid encoding the first sgRNA comprises SEQ ID NO: 705. In some embodiments the promoter for expression of the nucleic acid encoding the first sgRNA comprises SEQ ID NO: 9006. In some embodiments the promoter for expression of the nucleic acid encoding the first sgRNA comprises SEQ ID NO: 9007. In some embodiments the promoter for expression of the nucleic acid encoding the first sgRNA comprises SEQ ID NO: 9008. In some embodiments the promoter for expression of the nucleic acid encoding the first sgRNA comprises SEQ ID NO: 9009. In some embodiments the promoter for expression of the nucleic acid encoding the second sgRNA is any of the hU6c promoters disclosed herein. In some embodiments the promoter for expression of the nucleic acid encoding the second sgRNA comprises SEQ ID NO: 705. In some embodiments the promoter for expression of the nucleic acid encoding the second sgRNA comprises SEQ ID NO: 9001. In some embodiments the promoter for expression of the nucleic acid encoding the second sgRNA comprises SEQ ID NO: 9002. In some embodiments the promoter for expression of the nucleic acid encoding the second sgRNA comprises SEQ ID NO: 9003. In some embodiments the promoter for expression of the nucleic acid encoding the second sgRNA comprises SEQ ID NO: 9004. In some embodiments the promoter for expression of the nucleic acid encoding the second sgRNA is any of the 7SK2 promoters disclosed herein. In some embodiments the promoter for expression of the nucleic acid encoding the second sgRNA comprises SEQ ID NO: 705. In some embodiments the promoter for expression of the nucleic acid encoding the second sgRNA comprises SEQ ID NO: 9006. In some embodiments the promoter for expression of the nucleic acid encoding the second sgRNA comprises SEQ ID NO: 9007. In some embodiments the promoter for expression of the nucleic acid encoding the second sgRNA comprises SEQ ID NO: 9008. In some embodiments the promoter for expression of the nucleic acid encoding the second sgRNA comprises SEQ ID NO: 9009. In some embodiments the promoter for expression of the nucleic acid encoding the second sgRNA is any of the H1m promoters disclosed herein. In some embodiments, the promoter for SaCas9 is the CK8e promoter. In some embodiments, the nucleic acid sequence encoding SaCas9 is fused to a nucleic acid sequence encoding a nuclear localization sequence (NLS). In some embodiments, the nucleic acid sequence encoding SaCas9 is fused to two nucleic acid sequences each encoding a nuclear localization sequence (NLS). In some embodiments, the nucleic acid sequence encoding SaCas9 is fused to three nucleic acid sequences each encoding a nuclear localization sequence (NLS). In some embodiments, the one or more NLSs is an SV40 NLS. In some embodiments, the one or more NLSs is a c-Myc NLS. In some embodiments, the one or more NLSs is a nucleoplasmin NLS. In some embodiments, the NLS is fused to the SaCas9 with a linker.

[0207] In some embodiments, the AAV vector comprises from 5′ to 3′ with respect to the plus strand: the reverse complement of a first sgRNA scaffold sequence, the reverse complement of a nucleic acid encoding a first sgRNA guide sequence, the reverse complement of an hU6c promoter for expression of the nucleic acid encoding the first sgRNA, a promoter for expression of a nucleic acid encoding SaCas9 (e.g., CK8e), a nucleic acid encoding SaCas9, a polyadenylation sequence, an hU6c promoter for expression of a second sgRNA, a second sgRNA guide sequence, and a second sgRNA scaffold sequence. In some embodiments, the first sgRNA and the second sgRNA are selected from Table 2. In some embodiments, the nucleic acid sequence encoding SaCas9 is fused to a nucleic acid sequence encoding a nuclear localization sequence (NLS). In some embodiments, the nucleic acid sequence encoding SaCas9 is fused to two nucleic acid sequences each encoding a nuclear localization sequence (NLS). In some embodiments, the nucleic acid sequence encoding SaCas9 is fused to three nucleic acid sequences each encoding a nuclear localization sequence (NLS). In some embodiments, the one or more NLSs is an SV40 NLS. In some embodiments, the one or more NLSs is a c-Myc NLS. In some embodiments, the NLS is fused to the SaCas9 with a linker.

[0208] In some embodiments, the AAV vector comprises from 5′ to 3′ with respect to the plus strand: the reverse complement of a first sgRNA scaffold sequence, the reverse complement of a nucleic acid encoding a first sgRNA guide sequence, the reverse complement of an hU6c promoter for expression of the nucleic acid encoding the first sgRNA, a promoter for expression of a nucleic acid encoding SaCas9 (e.g., CK8e), a nucleic acid encoding SaCas9, a polyadenylation sequence, an 7SK promoter for expression of a second sgRNA, a second sgRNA guide sequence, and a second sgRNA scaffold sequence. In some embodiments, the first sgRNA and the second sgRNA are selected from Table 2. In some embodiments, the nucleic acid sequence encoding SaCas9 is fused to a nucleic acid sequence encoding a nuclear localization sequence (NLS). In some embodiments, the nucleic acid sequence encoding SaCas9 is fused to two nucleic acid sequences each encoding a nuclear localization sequence (NLS). In some embodiments, the nucleic acid sequence encoding SaCas9 is fused to three nucleic acid sequences each encoding a nuclear localization sequence (NLS). In some embodiments, the one or more NLSs is an SV40 NLS. In some embodiments, the one or more NLSs is a c-Myc NLS. In some embodiments, the NLS is fused to the SaCas9 with a linker.

[0209] In some embodiments, the AAV vector comprises from 5′ to 3′ with respect to the plus strand: the reverse complement of a first sgRNA scaffold sequence, the reverse complement of a nucleic acid encoding a first sgRNA guide sequence, the reverse complement of an hU6c promoter for expression of the nucleic acid encoding the first sgRNA, a promoter for expression of a nucleic acid encoding SaCas9 (e.g., CK8e), a nucleic acid encoding SaCas9, a polyadenylation sequence, an Him promoter for expression of a second sgRNA, a second sgRNA guide sequence, and a second sgRNA scaffold sequence. In some embodiments, the first sgRNA and the second sgRNA are selected from Table 2. In some embodiments, the nucleic acid sequence encoding SaCas9 is fused to a nucleic acid sequence encoding a nuclear localization sequence (NLS). In some embodiments, the nucleic acid sequence encoding SaCas9 is fused to two nucleic acid sequences each encoding a nuclear localization sequence (NLS). In some embodiments, the nucleic acid sequence encoding SaCas9 is fused to three nucleic acid sequences each encoding a nuclear localization sequence (NLS). In some embodiments, the one or more NLSs is an SV40 NLS. In some embodiments, the one or more NLSs is a c-Myc NLS. In some embodiments, the NLS is fused to the SaCas9 with a linker.

[0210] In some embodiments, the AAV vector comprises from 5′ to 3′ with respect to the plus strand: the reverse complement of a first sgRNA scaffold sequence, the reverse complement of a nucleic acid encoding a first sgRNA guide sequence, the reverse complement of an 7SK promoter for expression of the nucleic acid encoding the first sgRNA, a promoter for expression of a nucleic acid encoding SaCas9 (e.g., CK8e), a nucleic acid encoding SaCas9, a polyadenylation sequence, an Him promoter for expression of a second sgRNA, a second sgRNA guide sequence, and a second sgRNA scaffold sequence. In some embodiments, the first sgRNA and the second sgRNA are selected from Table 2. In some embodiments, the nucleic acid sequence encoding SaCas9 is fused to a nucleic acid sequence encoding a nuclear localization sequence (NLS). In some embodiments, the nucleic acid sequence encoding SaCas9 is fused to two nucleic acid sequences each encoding a nuclear localization sequence (NLS). In some embodiments, the nucleic acid sequence encoding SaCas9 is fused to three nucleic acid sequences each encoding a nuclear localization sequence (NLS). In some embodiments, the one or more NLSs is an SV40 NLS. In some embodiments, the one or more NLSs is a c-Myc NLS. In some embodiments, the NLS is fused to the SaCas9 with a linker.

[0211] In some embodiments, the disclosure provides for a composition comprising at least two nucleic acids. In some embodiments, the composition comprises at least two nucleic acid molecules, wherein the first nucleic acid molecule comprises a sequence encoding any of the endonucleases disclosed herein (e.g., a SaCas9 or SluCas9), wherein the second nucleic acid molecule encodes a first guide RNA and a second guide RNA, wherein the first guide RNA and the second guide RNA are not the same sequence, and wherein the second nucleic acid molecule does not encode an endonuclease. In some embodiments, the first nucleic acid molecule also encodes a copy of the first guide RNA and a copy of the second guide RNA. In some embodiments, the first nucleic acid molecule does not encode any guide RNAs. In some embodiments, the second nucleic acid molecule encodes two copies of the first guide RNA and two copies of the second guide RNA. In some embodiments, the second nucleic molecule encodes two copies of the first guide RNA, and one copy of the second guide RNA. In some embodiments, the second nucleic acid molecule encodes one copy of the first guide RNA, and two copies of the second guide RNA. In some embodiments, the second nucleic acid molecule comprises two copies of the first guide RNA, and three copies of the second guide RNA. In some embodiments, the second nucleic acid molecule comprises three copies of the first guide RNA, and two copies of the second guide RNA. In some embodiments, the second nucleic acid does not encode a Cas protein. In some embodiments, the second nucleic acid molecule encodes three copies of the first guide RNA and three copies of the second guide RNA. In some embodiments, the first nucleic acid molecule comprises from 5′ to 3′ with respect to the plus strand: the reverse complement of a first guide RNA scaffold sequence, the reverse complement of a nucleotide sequence encoding the first guide RNA sequence, the reverse complement of a promoter for expression of the nucleotide sequence encoding the first guide RNA sequence, a promoter for expression of a nucleotide sequence encoding the endonuclease, a nucleotide sequence encoding an endonuclease, a polyadenylation sequence, a promoter for expression of the second guide RNA in the same direction as the promoter for the endonuclease, the second guide RNA sequence, and a second guide RNA scaffold sequence. In some embodiments, the promoter for expression of the nucleotide sequence encoding the first guide RNA sequence in the first nucleic acid molecule is a U6 promoter and the promoter for expression of the nucleotide sequence encoding the second guide RNA in the first nucleic acid molecule is a U6 promoter. In some embodiments, the first sgRNA is associated with weaker expression than the second sgRNA when compared individually in a sgRNA expression assay, e.g., in an assay in which each guide is separately assessed (i.e., not in the same construct) using the same promoter, same concentration of genetic material/vector/RNP in substantially the same conditions (e.g., time, pH, temperature, buffer conditions).

[0212] In some embodiments, the AAV vector comprises from 5′ to 3′ with respect to the plus strand: a promoter for expression of a nucleic acid encoding a first sgRNA, a nucleic acid encoding the first sgRNA guide sequence, the first sgRNA scaffold sequence, a promoter for expression of SaCas9 (e.g., CK8e), a nucleic acid encoding SaCas9, a polyadenylation sequence, a promoter for expression of a second sgRNA, the second sgRNA guide sequence, and a second sgRNA scaffold sequence. See FIG. 3 at “Design 1”.

[0213] In some embodiments, the AAV vector comprises from 5′ to 3′ with respect to the plus strand: the reverse complement of a first sgRNA scaffold sequence, the reverse complement of a nucleic acid encoding a first sgRNA guide sequence, the reverse complement of a promoter for expression of the nucleic acid encoding the first sgRNA, a promoter for expression of a nucleic acid encoding SaCas9 (e.g., CK8e), a nucleic acid encoding SaCas9, a polyadenylation sequence, a promoter for expression of a second sgRNA, a second sgRNA guide sequence, and a second sgRNA scaffold sequence. See FIG. 3 at “Design 2”.

[0214] In some embodiments, the AAV vector comprises from 5′ to 3′ with respect to the plus strand: a promoter for expression of a nucleic acid encoding a first sgRNA, a nucleic acid encoding the first sgRNA guide sequence, a first sgRNA scaffold sequence, a promoter for expression of a second sgRNA, a second sgRNA guide sequence, and a second sgRNA scaffold sequence, a promoter for SaCas9 (e.g., CK8e), a nucleic acid encoding SaCas9, and a polyadenylation sequence. See FIG. 3 at “Design 3”.

[0215] In some embodiments, the AAV vector comprises from 5′ to 3′ with respect to the plus strand: a promoter for expression of a nucleic acid encoding SaCas9 (e.g., CK8e), a nucleic acid encoding SaCas9, a polyadenylation sequence, a promoter for expression of the nucleic acid encoding a first guide RNA, a nucleic acid encoding the first sgRNA guide sequence, a first sgRNA scaffold sequence, a promoter for expression of the second sgRNA, a second sgRNA guide sequence, and a second sgRNA scaffold sequence. See FIG. 3 at “Design 4”.

[0216] In some embodiments, the first nucleic acid molecule is in a first vector (e.g., AAV9), and the second nucleic acid is in a separate second vector. In some embodiments, the first vector is AAV9. In some embodiments, the second vector is AAV9. In preferred embodiments, the AAV9 vector is less than 5 kb from ITR to ITR in size, inclusive of both ITRs. In particular embodiments, the AAV9 vector is less than 4.9 kb from ITR to ITR in size, inclusive of both ITRs. In further embodiments, the AAV9 vector is less than 4.85 kb from ITR to ITR in size, inclusive of both ITRs. In further embodiments, the AAV9 vector is less than 4.8 kb from ITR to ITR in size, inclusive of both ITRs. In further embodiments, the AAV9 vector is less than 4.75 kb from ITR to ITR in size, inclusive of both ITRs. In further embodiments, the AAV9 vector is less than 4.7 kb from ITR to ITR in size, inclusive of both ITRs. In some embodiments, the second vector comprises from 5′ to 3′ with respect to the plus strand: a promoter for expression of a first copy of a first guide RNA (e.g., a U6 promoter), a first copy of a nucleotide sequence encoding a first guide RNA, a first copy of a nucleotide sequence encoding a first guide RNA scaffold, a promoter for expression of a second copy of the first guide RNA (e.g., a H1 promoter), a second copy of the nucleotide sequence encoding the first guide RNA, a second copy of the nucleotide sequence encoding the first guide RNA scaffold, a promoter for expression of a second guide RNA (e.g., a 7SK promoter), a nucleotide sequence encoding a second guide RNA, and a nucleotide sequence encoding a second guide RNA scaffold. In some embodiments, the second vector comprises from 5′ to 3′ with respect to the plus strand: a promoter for expression of a first guide RNA (e.g., a U6 promoter), a nucleotide sequence encoding a first guide RNA, a nucleotide sequence encoding a first guide RNA scaffold, a promoter for expression of a second guide RNA (e.g., a 7SK promoter), a nucleotide sequence encoding a second guide RNA, and a nucleotide sequence encoding a second guide RNA scaffold. In some embodiments, the second vector comprises a stuffer sequence (e.g., a 3′UTR desmin sequence) between the nucleotide sequence encoding the first guide scaffold sequence and the promoter for expression of the second guide sequence. In some embodiments, the second vector comprises from 5′ to 3′ with respect to the plus strand: the reverse complement of a nucleotide sequence encoding a scaffold for a first guide RNA, the reverse complement of a nucleotide sequence encoding a first guide RNA, the reverse complement of a promoter for expression of the first guide RNA (e.g., a U6c promoter), a promoter for expression of a second guide RNA (e.g., a U6c promoter), a nucleotide sequence encoding a second guide RNA, and a nucleotide sequence encoding a second guide RNA scaffold. In some embodiments, the second vector comprises a stuffer sequence (e.g., a 3′UTR desmin sequence) between the reverse complement of the promoter for expression of the first guide RNA and the promoter for expression of the second guide RNA. In some embodiments, the second vector comprises from 5′ to 3′ with respect to the plus strand: the reverse complement of a nucleotide sequence encoding a first copy of a first guide RNA scaffold, the reverse complement of a nucleotide sequence encoding a first copy of the first guide RNA, the reverse complement of a promoter for expression of the first copy of the first guide RNA (e.g., a 7SK2 promoter), the reverse complement of a second copy of the nucleotide sequence encoding the first guide RNA scaffold, the reverse complement of a second copy of the nucleotide sequence encoding the first guide RNA, the reverse complement of a promoter for expression of the second copy of the nucleotide sequence encoding the first guide RNA (e.g., a hU6c promoter), a promoter for expression of a first copy of a second guide RNA (e.g., a hU6c promoter), a first copy of a nucleotide sequence encoding a second guide RNA, a first copy of a nucleotide sequence encoding a second guide RNA scaffold, a promoter for expression of a second copy of the second guide RNA (e.g., a 7Sk2 promoter), a second copy of the nucleotide sequence encoding the second guide RNA, and a second copy of the nucleotide sequence encoding the second guide RNA scaffold. In some embodiments, the second vector comprises a stuffer sequence (e.g., a 3′UTR desmin sequence) between the reverse complement of the promoter for expression of the second copy of the first guide RNA and the promoter for expression of the first copy of the second guide RNA. In some embodiments, the second vector comprises from 5′ to 3′ with respect to the plus strand: the reverse complement of a nucleotide sequence encoding a first copy of a first guide RNA scaffold, the reverse complement of a first copy of a nucleotide sequence encoding the first guide RNA, the reverse complement of a promoter for expression of the first copy of the first guide RNA (e.g., a 7SK2 promoter), the reverse complement of a first copy of a nucleotide sequence encoding a second guide RNA scaffold, the reverse complement of a nucleotide sequence encoding the first copy of the second guide RNA, the reverse complement of a promoter for expression of the first copy of the second guide RNA (e.g., a hU6c promoter), a promoter for expression of a second copy of the second guide RNA (e.g., a hU6c promoter), a second copy of the nucleotide sequence encoding the second guide RNA, a second copy of the nucleotide sequence encoding the second guide RNA scaffold, a promoter for expression of a second copy of the first guide RNA (e.g., a 7SK2 promoter), a second copy of the nucleotide sequence encoding the first guide RNA, and a second copy of the nucleotide sequence encoding the first guide RNA scaffold. In some embodiments, the second vector comprises a stuffer sequence (e.g., a 3′UTR desmin sequence) between the reverse complement of the promoter for expression of the first copy of the second guide RNA and the promoter for expression of the second copy of the first guide RNA. In some embodiments, the second vector comprises from 5′ to 3′ with respect to the plus strand: the reverse complement of a nucleotide sequence encoding a first guide RNA scaffold, the reverse complement of a nucleotide sequence encoding a first guide RNA, the reverse complement of a promoter for expression of a first guide RNA (e.g., a hU6c promoter), a promoter for expression of a second guide RNA (e.g., a hU6c promoter), a nucleotide sequence encoding a second guide RNA, and a nucleotide sequence encoding a second guide RNA scaffold. In some embodiments, the second vector comprises a stuffer sequence (e.g., a 3′UTR desmin sequence) between the reverse complement of the promoter for expression of the first guide RNA and the promoter for expression of the second guide RNA. In particular embodiments, the first guide RNA is different from the second guide RNA. In some embodiments, the first guide RNA comprises a sequence of Table 2 and the second guide RNA comprises a different sequence from Table 2.

[0217] In some embodiments, if the composition comprises one or more nucleic acids encoding an RNA-targeted endonuclease and one or more guide RNAs, the one or more nucleic acids are designed such that they express the one or more guide RNAs at an equivalent or higher level (e.g., a greater number of expressed transgene copies) as compared to the expression level of the RNA-targeted endonuclease. In some embodiments, the one or more nucleic acids are designed such that they express (e.g., on average in 100 cells) the one or more guide RNAs at least a 1.1, 1.2, 1.3, 1.4, or 1.5 times higher level (e.g., a greater number of expressed transgene copies) as compared to the expression level of the RNA-targeted endonuclease. In some embodiments, the one or more nucleic acids are designed such that they express the one or more guide RNAs at 1.01-1.5, 1.01-1.4, 1.01-1.3, 1.01-1.2, 1.01-1.1, 1.1-2.0, 1.1-1.8, 1.1-1.6, 1.1-1.4, 1.1-1.3, 1.2-2.0, 1.2-1.8, 1.2-1.6, 1.2-1.4, 1.4-2.0, 1.4-1.8, 1.4-1.6, 1.6-2.0, 1.6-1.8, or 1.8-2.0 times higher level (e.g., a greater number of expressed transgene copies) as compared to the expression level of the RNA-targeted endonuclease. In some embodiments, the one or more guide RNAs are designed to express a higher level than the RNA-targeted endonuclease by: a) utilizing one or more regulatory elements (e.g., promoters or enhancers) that express the one or more guide RNAs at a higher level as compared to the regulatory elements (e.g., promoters or enhancers) for expression of the RNA-targeted endonuclease; and/or b) expressing more copies of one or more of the guide RNAs as compared to the number of copies of the RNA-targeted endonuclease (e.g., 2× or 3× as many copies of the nucleotide sequences encoding the one or more guide RNAs as compared to the number of copies of the nucleotide sequences encoding the RNA-targeted endonuclease). For example, in some embodiments, the composition comprises multiple nucleic acid molecules (e.g., in multiple vectors), wherein for every nucleotide sequence encoding an RNA-targeted endonuclease in the nucleic acid molecules in the composition, there are two or three copies of the nucleotide sequence encoding the guide RNA in the nucleic acid molecules in the composition. In some embodiments, the composition comprises a first guide RNA and a second guide RNA, wherein the first guide RNA and the second guide RNA are not the same (e.g., any of the guide RNA pairs disclosed herein), and for every nucleotide sequence encoding an RNA-targeted endonuclease in the nucleic acid molecules in the composition, there are two or three copies of the nucleotide sequence encoding the first guide RNA and/or the second guide RNA.

### Endonucleases

[0218] In some embodiments, any of the nucleic acids disclosed herein encodes an RNA-targeted endonuclease. In some embodiments, the RNA-targeted endonuclease has cleavase activity, which can also be referred to as double-strand endonuclease activity. In some embodiments, the RNA-targeted endonuclease comprises a Cas nuclease. Examples of Cas9 nucleases include those of the type II CRISPR systems.

[0219] In some embodiments, the Cas protein comprises an amino acid sequence that is at least 80%, 85%, 90%, 91%, 92%, 93%, 94%, 95%, 96%, 97%, 98%, 99% or 100% identical to the sequence of SEQ ID NO: 8 (designated herein as SpCas9):

[sequence omitted]

[0220] In some embodiments, the nucleic acid encoding SaCas9 encodes an SaCas9 comprising an amino acid sequence that is at least 80%, 85%, 90%, 91%, 92%, 93%, 94%, 95%, 96%, 97%, 98%, 99% or 100% identical to the sequence of SEQ ID NO: 711:

KRNYILGLDIGITSVGYGIIDYETRDVIDAGVRLFKEANVENNEGRRSKRGARRLKRRRRHRI
QRVKKLLFDYNLLTDHSELSGINPYEARVKGLSQKLSEEEFSAALLHLAKRRGVHNVNEVEE
DTGNELSTKEQISRNSKALEEKYVAELQLERLKKDGEVRGSINRFKTSDYVKEAKQLLKVQK
AYHQLDQSFIDTYIDLLETRRTYYEGPGEGSPFGWKDIKEWYEMLMGHCTYFPEELRSVKYA
YNADLYNALNDLNNLVITRDENEKLEYYEKFQIIENVFKQKKKPTLKQIAKEILVNEEDIKGY
RVTSTGKPEFTNLKVYHDIKDITARKEIIENAELLDQIAKILTIYQSSEDIQEELTNLNSELTQEE
IEQISNLKGYTGTHNLSLKAINLILDELWHTNDNQIAIFNRLKLVPKKVDLSQQKEIPTTLVDD
FILSPVVKRSFIQSIKVINAIIKKYGLPNDIIIELAREKNSKDAQKMINEMQKRNRQTNERIEEIIR
TTGKENAKYLIEKIKLHDMQEGKCLYSLEAIPLEDLLNNPFNYEVDHIIPRSVSFDNSFNNKVL
VKQEENSKKGNRTPFQYLSSSDSKISYETFKKHILNLAKGKGRISKTKKEYLLEERDINRFSVQ
KDFINRNLVDTRYATRGLMNLLRSYFRVNNLDVKVKSINGGFTSFLRRKWKFKKERNKGYK
HHAEDALIIANADFIFKEWKKLDKAKKVMENQMFEEKQAESMPEIETEQEYKEIFITPHQIKHI
KDFKDYKYSHRVDKKPNRELINDTLYSTRKDDKGNTLIVNNLNGLYDKDNDKLKKLINKSP
EKLLMYHHDPQTYQKLKLIMEQYGDEKNPLYKYYEETGNYLTKYSKKDNGPVIKKIKYYGN
KLNAHLDITDDYPNSRNKVVKLSLKPYRFDVYLDNGVYKFVTVKNLDVIKKENYYEVNSKC
YEEAKKLKKISNQAEFIASFYNNDLIKINGELYRVIGVNNDLLNRIEVNMIDITYREYLENMN
DKRPPRIIKTIASKTQSIKKYSTDILGNLYEVKSKKHPQIIKKG.

[0221] In some embodiments, the nucleic acid encoding SaCas9 comprises the nucleic acid of SEQ ID NO: 9014:

AAGCGCAATTACATCCTGGGCCTGGATATCGGCATCACCTCCGTGGGCTACG
GCATCATCGACTATGAGACACGGGATGTGATCGACGCCGGCGTGAGACTGTTCAAGGAG
GCCAACGTGGAGAACAATGAGGGCCGGCGGAGCAAGAGGGGAGCAAGGCGCCTGAAGC
GGAGAAGGCGCCACAGAATCCAGAGAGTGAAGAAGCTGCTGTTCGATTACAACCTGCTG
ACCGACCACTCCGAGCTGTCTGGCATCAATCCTTATGAGGCCCGGGTGAAGGGCCTGTCC
CAGAAGCTGTCTGAGGAGGAGTTTTCTGCCGCCCTGCTGCACCTGGCAAAGAGGAGAGG
CGTGCACAACGTGAATGAGGTGGAGGAGGACACCGGCAACGAGCTGAGCACAAAGGAG
CAGATCAGCCGCAATTCCAAGGCCCTGGAGGAGAAGTATGTGGCCGAGCTGCAGCTGGA
GCGGCTGAAGAAGGATGGCGAGGTGAGGGGCTCCATCAATCGCTTCAAGACCTCTGACT
ACGTGAAGGAGGCCAAGCAGCTGCTGAAGGTGCAGAAGGCCTACCACCAGCTGGATCAG
AGCTTTATCGATACATATATCGACCTGCTGGAGACCAGGCGCACATACTATGAGGGACC
AGGAGAGGGCTCCCCCTTCGGCTGGAAGGACATCAAGGAGTGGTACGAGATGCTGATGG
GCCACTGCACCTATTTTCCAGAGGAGCTGAGATCCGTGAAGTACGCCTATAACGCCGATC
TGTACAACGCCCTGAATGACCTGAACAACCTGGTCATCACCAGGGATGAGAACGAGAAG
CTGGAGTACTATGAGAAGTTCCAGATCATCGAGAACGTGTTCAAGCAGAAGAAGAAGCC
TACACTGAAGCAGATCGCCAAGGAGATCCTGGTGAACGAGGAGGACATCAAGGGCTACC
GCGTGACCAGCACAGGCAAGCCAGAGTTCACCAATCTGAAGGTGTATCACGATATCAAG
GACATCACAGCCCGGAAGGAGATCATCGAGAACGCCGAGCTGCTGGATCAGATCGCCAA
GATCCTGACCATCTATCAGAGCTCCGAGGACATCCAGGAGGAGCTGACCAACCTGAATA
GCGAGCTGACACAGGAGGAGATCGAGCAGATCAGCAATCTGAAGGGCTACACCGGCAC
ACACAACCTGTCCCTGAAGGCCATCAATCTGATCCTGGATGAGCTGTGGCACACAAACG
ACAATCAGATCGCCATCTTTAACAGGCTGAAGCTGGTGCCAAAGAAGGTGGACCTGAGC
CAGCAGAAGGAGATCCCAACCACACTGGTGGACGATTTCATCCTGTCCCCCGTGGTGAA
GCGGAGCTTCATCCAGAGCATCAAAGTGATCAACGCCATCATCAAGAAGTACGGCCTGC
CCAATGATATCATCATCGAGCTGGCCAGGGAGAAGAACTCTAAGGACGCCCAGAAGATG
ATCAATGAGATGCAGAAGAGGAACCGCCAGACCAATGAGCGGATCGAGGAGATCATCA
GAACCACAGGCAAGGAGAACGCCAAGTACCTGATCGAGAAGATCAAGCTGCACGATAT
GCAGGAGGGCAAGTGTCTGTATAGCCTGGAGGCCATCCCTCTGGAGGACCTGCTGAACA
ATCCATTCAACTACGAGGTGGATCACATCATCCCCCGGAGCGTGAGCTTCGACAATTCCT
TTAACAATAAGGTGCTGGTGAAGCAGGAGGAGAACTCTAAGAAGGGCAATAGGACCCCT
TTCCAGTACCTGTCTAGCTCCGATTCTAAGATCAGCTACGAGACCTTCAAGAAGCACATC
CTGAATCTGGCCAAGGGCAAGGGCCGCATCTCTAAGACCAAGAAGGAGTACCTGCTGGA
GGAGCGGGACATCAACAGATTCAGCGTGCAGAAGGACTTCATCAACCGGAATCTGGTGG
ACACCAGATACGCCACACGCGGCCTGATGAATCTGCTGCGGTCCTATTTCAGAGTGAACA
ATCTGGATGTGAAGGTGAAGAGCATCAACGGCGGCTTCACCTCCTTTCTGCGGAGAAAG
TGGAAGTTTAAGAAGGAGAGAAACAAGGGCTATAAGCACCACGCCGAGGATGCCCTGAT
CATCGCCAATGCCGACTTCATCTTTAAGGAGTGGAAGAAGCTGGACAAGGCCAAGAAAG
TGATGGAGAACCAGATGTTCGAGGAGAAGCAGGCCGAGAGCATGCCCGAGATCGAGAC
CGAGCAGGAGTACAAGGAGATTTTCATCACACCTCACCAGATCAAGCACATCAAGGACT
TCAAGGACTACAAGTATTCCCACAGGGTGGATAAGAAGCCCAACCGCGAGCTGATCAAT
GACACCCTGTATTCTACAAGGAAGGACGATAAGGGCAATACCCTGATCGTGAACAATCT
GAACGGCCTGTACGACAAGGATAATGACAAGCTGAAGAAGCTGATCAACAAGAGCCCC
GAGAAGCTGCTGATGTACCACCACGATCCTCAGACATATCAGAAGCTGAAGCTGATCAT
GGAGCAGTACGGCGACGAGAAGAACCCACTGTATAAGTACTATGAGGAGACCGGCAACT
ACCTGACAAAGTATTCCAAGAAGGATAATGGCCCCGTGATCAAGAAGATCAAGTACTAT
GGCAACAAGCTGAATGCCCACCTGGACATCACCGACGATTACCCCAACAGCCGGAATAA
GGTGGTGAAGCTGAGCCTGAAGCCATACAGGTTCGACGTGTACCTGGACAACGGCGTGT
ATAAGTTTGTGACAGTGAAGAATCTGGATGTGATCAAGAAGGAGAACTACTATGAAGTG
AATAGCAAGTGCTACGAGGAGGCCAAGAAGCTGAAGAAGATCAGCAACCAGGCCGAGT
TCATCGCCTCTTTTTACAACAATGACCTGATCAAGATCAATGGCGAGCTGTATAGAGTGA
TCGGCGTGAACAATGATCTGCTGAACCGCATCGAAGTGAATATGATCGACATCACCTACC
GGGAGTATCTGGAGAACATGAATGATAAGAGGCCCCCTCGCATCATCAAGACCATCGCC
TCTAAGACACAGAGCATCAAGAAGTACTCTACAGACATCCTGGGCAACCTGTATGAGGT
GAAGAGCAAGAAGCACCCTCAGATCATCAAGAAGGGC.

In some embodiments comprising a nucleic acid encoding SaCas9, the SaCas9 comprises an amino acid sequence of SEQ ID NO: 711.

[0222] In some embodiments, the SaCas9 is a variant of the amino acid sequence of SEQ ID NO: 711. In some embodiments, the SaCas9 comprises an amino acid other than an E at the position corresponding to position 781 of SEQ ID NO: 711. In some embodiments, the SaCas9 comprises an amino acid other than an N at the position corresponding to position 967 of SEQ ID NO: 711. In some embodiments, the SaCas9 comprises an amino acid other than an R at the position corresponding to position 1014 of SEQ ID NO: 711. In some embodiments, the SaCas9 comprises a K at the position corresponding to position 781 of SEQ ID NO: 711. In some embodiments, the SaCas9 comprises a K at the position corresponding to position 967 of SEQ ID NO: 711. In some embodiments, the SaCas9 comprises an H at the position corresponding to position 1014 of SEQ ID NO: 711. In some embodiments, the SaCas9 comprises an amino acid other than an E at the position corresponding to position 781 of SEQ ID NO: 711; an amino acid other than an N at the position corresponding to position 967 of SEQ ID NO: 711; and an amino acid other than an R at the position corresponding to position 1014 of SEQ ID NO: 711. In some embodiments, the SaCas9 comprises a K at the position corresponding to position 781 of SEQ ID NO: 711; a K at the position corresponding to position 967 of SEQ ID NO: 711; and an H at the position corresponding to position 1014 of SEQ ID NO: 711.

[0223] In some embodiments, the SaCas9 comprises an amino acid other than an R at the position corresponding to position 244 of SEQ ID NO: 711. In some embodiments, the SaCas9 comprises an amino acid other than an N at the position corresponding to position 412 of SEQ ID NO: 711. In some embodiments, the SaCas9 comprises an amino acid other than an N at the position corresponding to position 418 of SEQ ID NO: 711. In some embodiments, the SaCas9 comprises an amino acid other than an R at the position corresponding to position 653 of SEQ ID NO: 711. In some embodiments, the SaCas9 comprises an amino acid other than an R at the position corresponding to position 244 of SEQ ID NO: 711; an amino acid other than an N at the position corresponding to position 412 of SEQ ID NO: 711; an amino acid other than an N at the position corresponding to position 418 of SEQ ID NO: 711; and an amino acid other than an R at the position corresponding to position 653 of SEQ ID NO: 711. In some embodiments, the SaCas9 comprises an A at the position corresponding to position 244 of SEQ ID NO: 711. In some embodiments, the SaCas9 comprises an A at the position corresponding to position 412 of SEQ ID NO: 711. In some embodiments, the SaCas9 comprises an A at the position corresponding to position 418 of SEQ ID NO: 711. In some embodiments, the SaCas9 comprises an A at the position corresponding to position 653 of SEQ ID NO: 711. In some embodiments, the SaCas9 comprises an A at the position corresponding to position 244 of SEQ ID NO: 711; an A at the position corresponding to position 412 of SEQ ID NO: 711; an A at the position corresponding to position 418 of SEQ ID NO: 711; and an A at the position corresponding to position 653 of SEQ ID NO: 711.

[0224] In some embodiments, the SaCas9 comprises an amino acid other than an R at the position corresponding to position 244 of SEQ ID NO: 711; an amino acid other than an N at the position corresponding to position 412 of SEQ ID NO: 711; an amino acid other than an N at the position corresponding to position 418 of SEQ ID NO: 711; an amino acid other than an R at the position corresponding to position 653 of SEQ ID NO: 711; an amino acid other than an E at the position corresponding to position 781 of SEQ ID NO: 711; an amino acid other than an N at the position corresponding to position 967 of SEQ ID NO: 711; and an amino acid other than an R at the position corresponding to position 1014 of SEQ ID NO: 711. In some embodiments, the SaCas9 comprises an A at the position corresponding to position 244 of SEQ ID NO: 711; an A at the position corresponding to position 412 of SEQ ID NO: 711; an A at the position corresponding to position 418 of SEQ ID NO: 711; an A at the position corresponding to position 653 of SEQ ID NO: 711; a K at the position corresponding to position 781 of SEQ ID NO: 711; a K at the position corresponding to position 967 of SEQ ID NO: 711; and an H at the position corresponding to position 1014 of SEQ ID NO: 711.

[0225] In some embodiments, the SaCas9 comprises an amino acid sequence that is at least 80%, 85%, 90%, 91%, 92%, 93%, 94%, 95%, 96%, 97%, 98%, 99% or 100% identical to the sequence of SEQ ID NO: 715 (designated herein as SaCas9-KKH or SACAS9KKH):

KRNYILGLDIGITSVGYGIIDYETRDVIDAGVRLFKEANVENNEGRRSKRGARRLKRRRRHRI
QRVKKLLFDYNLLTDHSELSGINPYEARVKGLSQKLSEEEFSAALLHLAKRRGVHNVNEVEE
DTGNELSTKEQISRNSKALEEKYVAELQLERLKKDGEVRGSINRFKTSDYVKEAKQLLKVQK
AYHQLDQSFIDTYIDLLETRRTYYEGPGEGSPFGWKDIKEWYEMLMGHCTYFPEELRSVKYA
YNADLYNALNDLNNLVITRDENEKLEYYEKFQIIENVFKQKKKPTLKQIAKEILVNEEDIKGY
RVTSTGKPEFTNLKVYHDIKDITARKEIIENAELLDQIAKILTIYQSSEDIQEELTNLNSELTQEE
IEQISNLKGYTGTHNLSLKAINLILDELWHTNDNQIAIFNRLKLVPKKVDLSQQKEIPTTLVDD
FILSPVVKRSFIQSIKVINAIIKKYGLPNDIIIELAREKNSKDAQKMINEMQKRNRQTNERIEEIIR
TTGKENAKYLIEKIKLHDMQEGKCLYSLEAIPLEDLLNNPFNYEVDHIIPRSVSFDNSFNNKVL
VKQEENSKKGNRTPFQYLSSSDSKISYETFKKHILNLAKGKGRISKTKKEYLLEERDINRFSVQ
KDFINRNLVDTRYATRGLMNLLRSYFRVNNLDVKVKSINGGFTSFLRRKWKFKKERNKGYK
HHAEDALIIANADFIFKEWKKLDKAKKVMENQMFEEKQAESMPEIETEQEYKEIFITPHQIKHI
KDFKDYKYSHRVDKKPNRKLINDTLYSTRKDDKGNTLIVNNLNGLYDKDNDKLKKLINKSP
EKLLMYHHDPQTYQKLKLIMEQYGDEKNPLYKYYEETGNYLTKYSKKDNGPVIKKIKYYGN
KLNAHLDITDDYPNSRNKVVKLSLKPYRFDVYLDNGVYKFVTVKNLDVIKKENYYEVNSKC
YEEAKKLKKISNQAEFIASFYKNDLIKINGELYRVIGVNNDLLNRIEVNMIDITYREYLENMN
DKRPPHIIKTIASKTQSIKKYSTDILGNLYEVKSKKHPQIIKKG.

[0226] In some embodiments, the SaCas9 comprises an amino acid sequence that is at least 80%, 85%, 90%, 91%, 92%, 93%, 94%, 95%, 96%, 97%, 98%, 99% or 100% identical to the sequence of SEQ ID NO: 716 (designated herein as SaCas9-HF):

KRNYILGLDIGITSVGYGIIDYETRDVIDAGVRLFKEANVENNEGRRSKRGARRLKRRRRHRI
QRVKKLLFDYNLLTDHSELSGINPYEARVKGLSQKLSEEEFSAALLHLAKRRGVHNVNEVEE
DTGNELSTKEQISRNSKALEEKYVAELQLERLKKDGEVRGSINRFKTSDYVKEAKQLLKVQK
AYHQLDQSFIDTYIDLLETRRTYYEGPGEGSPFGWKDIKEWYEMLMGHCTYFPEELASVKYA
YNADLYNALNDLNNLVITRDENEKLEYYEKFQIIENVFKQKKKPTLKQIAKEILVNEEDIKGY
RVTSTGKPEFTNLKVYHDIKDITARKEIIENAELLDQIAKILTIYQSSEDIQEELTNLNSELTQEE
IEQISNLKGYTGTHNLSLKAINLILDELWHTNDAQIAIFARLKLVPKKVDLSQQKEIPTTLVDD
FILSPVVKRSFIQSIKVINAIIKKYGLPNDIIIELAREKNSKDAQKMINEMQKRNRQTNERIEEIIR
TTGKENAKYLIEKIKLHDMQEGKCLYSLEAIPLEDLLNNPFNYEVDHIIPRSVSFDNSFNNKVL
VKQEENSKKGNRTPFQYLSSSDSKISYETFKKHILNLAKGKGRISKTKKEYLLEERDINRFSVQ
KDFINRNLVDTRYATAGLMNLLRSYFRVNNLDVKVKSINGGFTSFLRRKWKFKKERNKGYK
HHAEDALIIANADFIFKEWKKLDKAKKVMENQMFEEKQAESMPEIETEQEYKEIFITPHQIKHI
KDFKDYKYSHRVDKKPNRELINDTLYSTRKDDKGNTLIVNNLNGLYDKDNDKLKKLINKSP
EKLLMYHHDPQTYQKLKLIMEQYGDEKNPLYKYYEETGNYLTKYSKKDNGPVIKKIKYYGN
KLNAHLDITDDYPNSRNKVVKLSLKPYRFDVYLDNGVYKFVTVKNLDVIKKENYYEVNSKC
YEEAKKLKKISNQAEFIASFYNNDLIKINGELYRVIGVNNDLLNRIEVNMIDITYREYLENMN
DKRPPRIIKTIASKTQSIKKYSTDILGNLYEVKSKKHPQIIKKG.

[0227] In some embodiments, the SaCas9 comprises an amino acid sequence that is at least 80%, 85%, 90%, 91%, 92%, 93%, 94%, 95%, 96%, 97%, 98%, 99% or 100% identical to the sequence of SEQ ID NO: 717 (designated herein as SaCas9-KKH-HF):

KRNYILGLDIGITSVGYGIIDYETRDVIDAGVRLFKEANVENNEGRRSKRGARRLKRRRRHRI
QRVKKLLFDYNLLTDHSELSGINPYEARVKGLSQKLSEEEFSAALLHLAKRRGVHNVNEVEE
DTGNELSTKEQISRNSKALEEKYVAELQLERLKKDGEVRGSINRFKTSDYVKEAKQLLKVQK
AYHQLDQSFIDTYIDLLETRRTYYEGPGEGSPFGWKDIKEWYEMLMGHCTYFPEELASVKYA
YNADLYNALNDLNNLVITRDENEKLEYYEKFQIIENVFKQKKKPTLKQIAKEILVNEEDIKGY
RVTSTGKPEFTNLKVYHDIKDITARKEIIENAELLDQIAKILTIYQSSEDIQEELTNLNSELTQEE
IEQISNLKGYTGTHNLSLKAINLILDELWHTNDAQIAIFARLKLVPKKVDLSQQKEIPTTLVDD
FILSPVVKRSFIQSIKVINAIIKKYGLPNDIIIELAREKNSKDAQKMINEMQKRNRQTNERIEEIIR
TTGKENAKYLIEKIKLHDMQEGKCLYSLEAIPLEDLLNNPFNYEVDHIIPRSVSFDNSFNNKVL
VKQEENSKKGNRTPFQYLSSSDSKISYETFKKHILNLAKGKGRISKTKKEYLLEERDINRFSVQ
KDFINRNLVDTRYATAGLMNLLRSYFRVNNLDVKVKSINGGFTSFLRRKWKFKKERNKGYK
HHAEDALIIANADFIFKEWKKLDKAKKVMENQMFEEKQAESMPEIETEQEYKEIFITPHQIKHI
KDFKDYKYSHRVDKKPNRKLINDTLYSTRKDDKGNTLIVNNLNGLYDKDNDKLKKLINKSP
EKLLMYHHDPQTYQKLKLIMEQYGDEKNPLYKYYEETGNYLTKYSKKDNGPVIKKIKYYGN
KLNAHLDITDDYPNSRNKVVKLSLKPYRFDVYLDNGVYKFVTVKNLDVIKKENYYEVNSKC
YEEAKKLKKISNQAEFIASFYKNDLIKINGELYRVIGVNNDLLNRIEVNMIDITYREYLENMN
DKRPPHIIKTIASKTQSIKKYSTDILGNLYEVKSKKHPQIIKKG.

[0228] In some embodiments, the nucleic acid encoding SluCas9 encodes a SluCas9 comprising an amino acid sequence that is at least 80%, 85%, 90%, 91%, 92%, 93%, 94%, 95%, 96%, 97%, 98%, 99% or 100% identical to the sequence of SEQ ID NO: 712:

NQKFILGLDIGITSVGYGLIDYETKNIIDAGVRLFPEANVENNEGRRSKRGSRRLKRRRIHRLE
RVKKLLEDYNLLDQSQIPQSTNPYAIRVKGLSEALSKDELVIALLHIAKRRGIHKIDVIDSNDD
VGNELSTKEQLNKNSKLLKDKFVCQIQLERMNEGQVRGEKNRFKTADIIKEIIQLLNVQKNFH
QLDENFINKYIELVEMRREYFEGPGKGSPYGWEGDPKAWYETLMGHCTYFPDELRSVKYAY
SADLFNALNDLNNLVIQRDGLSKLEYHEKYHIIENVFKQKKKPTLKQIANEINVNPEDIKGYRI
TKSGKPQFTEFKLYHDLKSVLFDQSILENEDVLDQIAEILTIYQDKDSIKSKLTELDILLNEEDK
ENIAQLTGYTGTHRLSLKCIRLVLEEQWYSSRNQMEIFTHLNIKPKKINLTAANKIPKAMIDEF
ILSPVVKRTFGQAINLINKIIEKYGVPEDIIIELARENNSKDKQKFINEMQKKNENTRKRINEIIG
KYGNQNAKRLVEKIRLHDEQEGKCLYSLESIPLEDLLNNPNHYEVDHIIPRSVSFDNSYHNKV
LVKQSENSKKSNLTPYQYFNSGKSKLSYNQFKQHILNLSKSQDRISKKKKEYLLEERDINKFE
VQKEFINRNLVDTRYATRELTNYLKAYFSANNMNVKVKTINGSFTDYLRKVWKFKKERNH
GYKHHAEDALIIANADFLFKENKKLKAVNSVLEKPEIETKQLDIQVDSEDNYSEMFIIPKQVQ
DIKDFRNFKYSHRVDKKPNRQLINDTLYSTRKKDNSTYIVQTIKDIYAKDNTTLKKQFDKSPE
KFLMYQHDPRTFEKLEVIMKQYANEKNPLAKYHEETGEYLTKYSKKNNGPIVKSLKYIGNK
LGSHLDVTHQFKSSTKKLVKLSIKPYRFDVYLTDKGYKFITISYLDVLKKDNYYYIPEQKYDK
LKLGKAIDKNAKFIASFYKNDLIKLDGEIYKIIGVNSDTRNMIELDLPDIRYKEYCELNNIKGEP
RIKKTIGKKVNSIEKLTTDVLGNVFTNTQYTKPQLLFKRGN.

[0229] In some embodiments, the SluCas9 is a variant of the amino acid sequence of SEQ ID NO: 712. In some embodiments, the SluCas9 comprises an amino acid other than an Q at the position corresponding to position 781 of SEQ ID NO: 712. In some embodiments, the SluCas9 comprises an amino acid other than an R at the position corresponding to position 1013 of SEQ ID NO: 712. In some embodiments, the SluCas9 comprises a K at the position corresponding to position 781 of SEQ ID NO: 712. In some embodiments, the SluCas9 comprises a K at the position corresponding to position 966 of SEQ ID NO: 712. In some embodiments, the SluCas9 comprises an H at the position corresponding to position 1013 of SEQ ID NO: 712. In some embodiments, the SluCas9 comprises an amino acid other than an Q at the position corresponding to position 781 of SEQ ID NO: 712; and an amino acid other than an R at the position corresponding to position 1013 of SEQ ID NO: 712. In some embodiments, the SluCas9 comprises a K at the position corresponding to position 781 of SEQ ID NO: 712; a K at the position corresponding to position 966 of SEQ ID NO: 712; and an H at the position corresponding to position 1013 of SEQ ID NO: 712.

[0230] In some embodiments, the SluCas9 comprises an amino acid other than an R at the position corresponding to position 246 of SEQ ID NO: 712. In some embodiments, the SluCas9 comprises an amino acid other than an N at the position corresponding to position 414 of SEQ ID NO: 712. In some embodiments, the SluCas9 comprises an amino acid other than a T at the position corresponding to position 420 of SEQ ID NO: 712. In some embodiments, the SluCas9 comprises an amino acid other than an R at the position corresponding to position 655 of SEQ ID NO: 712. In some embodiments, the SluCas9 comprises an amino acid other than an R at the position corresponding to position 246 of SEQ ID NO: 712; an amino acid other than an N at the position corresponding to position 414 of SEQ ID NO: 712; an amino acid other than a T at the position corresponding to position 420 of SEQ ID NO: 712; and an amino acid other than an R at the position corresponding to position 655 of SEQ ID NO: 712. In some embodiments, the SluCas9 comprises an A at the position corresponding to position 246 of SEQ ID NO: 712. In some embodiments, the SluCas9 comprises an A at the position corresponding to position 414 of SEQ ID NO: 712. In some embodiments, the SluCas9 comprises an A at the position corresponding to position 420 of SEQ ID NO: 712. In some embodiments, the SluCas9 comprises an A at the position corresponding to position 655 of SEQ ID NO: 712. In some embodiments, the SluCas9 comprises an A at the position corresponding to position 246 of SEQ ID NO: 712; an A at the position corresponding to position 414 of SEQ ID NO: 712; an A at the position corresponding to position 420 of SEQ ID NO: 712; and an A at the position corresponding to position 655 of SEQ ID NO: 712.

[0231] In some embodiments, the SluCas9 comprises an amino acid other than an R at the position corresponding to position 246 of SEQ ID NO: 712; an amino acid other than an N at the position corresponding to position 414 of SEQ ID NO: 712; an amino acid other than a T at the position corresponding to position 420 of SEQ ID NO: 712; an amino acid other than an R at the position corresponding to position 655 of SEQ ID NO: 712; an amino acid other than an Q at the position corresponding to position 781 of SEQ ID NO: 712; a K at the position corresponding to position 966 of SEQ ID NO: 712; and an amino acid other than an R at the position corresponding to position 1013 of SEQ ID NO: 712. In some embodiments, the SluCas9 comprises an A at the position corresponding to position 246 of SEQ ID NO: 712; an A at the position corresponding to position 414 of SEQ ID NO: 712; an A at the position corresponding to position 420 of SEQ ID NO: 712; an A at the position corresponding to position 655 of SEQ ID NO: 712; a K at the position corresponding to position 781 of SEQ ID NO: 712; a K at the position corresponding to position 966 of SEQ ID NO: 712; and an H at the position corresponding to position 1013 of SEQ ID NO: 712.

[0232] In some embodiments, the SluCas9 comprises an amino acid sequence that is at least 80%, 85%, 90%, 91%, 92%, 93%, 94%, 95%, 96%, 97%, 98%, 99% or 100% identical to the sequence of SEQ ID NO: 718 (designated herein as SluCas9-KH or SLUCAS9KH):

NQKFILGLDIGITSVGYGLIDYETKNIIDAGVRLFPEANVENNEGRRSKRGSRRLKRRRIHRLE
RVKKLLEDYNLLDQSQIPQSTNPYAIRVKGLSEALSKDELVIALLHIAKRRGIHKIDVIDSNDD
VGNELSTKEQLNKNSKLLKDKFVCQIQLERMNEGQVRGEKNRFKTADIIKEIIQLLNVQKNFH
QLDENFINKYIELVEMRREYFEGPGKGSPYGWEGDPKAWYETLMGHCTYFPDELRSVKYAY
SADLFNALNDLNNLVIQRDGLSKLEYHEKYHIIENVFKQKKKPTLKQIANEINVNPEDIKGYRI
TKSGKPQFTEFKLYHDLKSVLFDQSILENEDVLDQIAEILTIYQDKDSIKSKLTELDILLNEEDK
ENIAQLTGYTGTHRLSLKCIRLVLEEQWYSSRNQMEIFTHLNIKPKKINLTAANKIPKAMIDEF
ILSPVVKRTFGQAINLINKIIEKYGVPEDIIIELARENNSKDKQKFINEMQKKNENTRKRINEIIG
KYGNQNAKRLVEKIRLHDEQEGKCLYSLESIPLEDLLNNPNHYEVDHIIPRSVSFDNSYHNKV
LVKQSENSKKSNLTPYQYFNSGKSKLSYNQFKQHILNLSKSQDRISKKKKEYLLEERDINKFE
VQKEFINRNLVDTRYATRELTNYLKAYFSANNMNVKVKTINGSFTDYLRKVWKFKKERNH
GYKHHAEDALIIANADFLFKENKKLKAVNSVLEKPEIETKQLDIQVDSEDNYSEMFIIPKQVQ
DIKDFRNFKYSHRVDKKPNRKLINDTLYSTRKKDNSTYIVQTIKDIYAKDNTTLKKQFDKSPE
KFLMYQHDPRTFEKLEVIMKQYANEKNPLAKYHEETGEYLTKYSKKNNGPIVKSLKYIGNK
LGSHLDVTHQFKSSTKKLVKLSIKPYRFDVYLTDKGYKFITISYLDVLKKDNYYYIPEQKYDK
LKLGKAIDKNAKFIASFYKNDLIKLDGEIYKIIGVNSDTRNMIELDLPDIRYKEYCELNNIKGEP
HIKKTIGKKVNSIEKLTTDVLGNVFTNTQYTKPQLLFKRGN.

[0233] In some embodiments, the SluCas9 comprises an amino acid sequence that is at least 80%, 85%, 90%, 91%, 92%, 93%, 94%, 95%, 96%, 97%, 98%, 99% or 100% identical to the sequence of SEQ ID NO: 719 (designated herein as SluCas9-HF):

NQKFILGLDIGITSVGYGLIDYETKNIIDAGVRLFPEANVENNEGRRSKRGSRRLKRRRIHRLE
RVKKLLEDYNLLDQSQIPQSTNPYAIRVKGLSEALSKDELVIALLHIAKRRGIHKIDVIDSNDD
VGNELSTKEQLNKNSKLLKDKFVCQIQLERMNEGQVRGEKNRFKTADIIKEIIQLLNVQKNFH
QLDENFINKYIELVEMRREYFEGPGKGSPYGWEGDPKAWYETLMGHCTYFPDELASVKYAY
SADLFNALNDLNNLVIQRDGLSKLEYHEKYHIIENVFKQKKKPTLKQIANEINVNPEDIKGYRI
TKSGKPQFTEFKLYHDLKSVLFDQSILENEDVLDQIAEILTIYQDKDSIKSKLTELDILLNEEDK
ENIAQLTGYTGTHRLSLKCIRLVLEEQWYSSRAQMEIFAHLNIKPKKINLTAANKIPKAMIDEF
ILSPVVKRTFGQAINLINKIIEKYGVPEDIIIELARENNSKDKQKFINEMQKKNENTRKRINEIIG
KYGNQNAKRLVEKIRLHDEQEGKCLYSLESIPLEDLLNNPNHYEVDHIIPRSVSFDNSYHNKV
LVKQSENSKKSNLTPYQYFNSGKSKLSYNQFKQHILNLSKSQDRISKKKKEYLLEERDINKFE
VQKEFINRNLVDTRYATAELTNYLKAYFSANNMNVKVKTINGSFTDYLRKVWKFKKERNH
GYKHHAEDALIIANADFLFKENKKLKAVNSVLEKPEIETKQLDIQVDSEDNYSEMFIIPKQVQ
DIKDFRNFKYSHRVDKKPNRQLINDTLYSTRKKDNSTYIVQTIKDIYAKDNTTLKKQFDKSPE
KFLMYQHDPRTFEKLEVIMKQYANEKNPLAKYHEETGEYLTKYSKKNNGPIVKSLKYIGNK
LGSHLDVTHQFKSSTKKLVKLSIKPYRFDVYLTDKGYKFITISYLDVLKKDNYYYIPEQKYDK
LKLGKAIDKNAKFIASFYKNDLIKLDGEIYKIIGVNSDTRNMIELDLPDIRYKEYCELNNIKGEP
RIKKTIGKKVNSIEKLTTDVLGNVFTNTQYTKPQLLFKRGN.

[0234] In some embodiments, the SluCas9 comprises an amino acid sequence that is at least 80%, 85%, 90%, 91%, 92%, 93%, 94%, 95%, 96%, 97%, 98%, 99% or 100% identical to the sequence of SEQ ID NO: 720 (designated herein as SluCas9-HF-KH):

NQKFILGLDIGITSVGYGLIDYETKNIIDAGVRLFPEANVENNEGRRSKRGSRRLKRRRIHRLE
RVKKLLEDYNLLDQSQIPQSTNPYAIRVKGLSEALSKDELVIALLHIAKRRGIHKIDVIDSNDD
VGNELSTKEQLNKNSKLLKDKFVCQIQLERMNEGQVRGEKNRFKTADIIKEIIQLLNVQKNFH
QLDENFINKYIELVEMRREYFEGPGKGSPYGWEGDPKAWYETLMGHCTYFPDELASVKYAY
SADLFNALNDLNNLVIQRDGLSKLEYHEKYHIIENVFKQKKKPTLKQIANEINVNPEDIKGYRI
TKSGKPQFTEFKLYHDLKSVLFDQSILENEDVLDQIAEILTIYQDKDSIKSKLTELDILLNEEDK
ENIAQLTGYTGTHRLSLKCIRLVLEEQWYSSRAQMEIFAHLNIKPKKINLTAANKIPKAMIDEF
ILSPVVKRTFGQAINLINKIIEKYGVPEDIIIELARENNSKDKQKFINEMQKKNENTRKRINEIIG
KYGNQNAKRLVEKIRLHDEQEGKCLYSLESIPLEDLLNNPNHYEVDHIIPRSVSFDNSYHNKV
LVKQSENSKKSNLTPYQYFNSGKSKLSYNQFKQHILNLSKSQDRISKKKKEYLLEERDINKFE
VQKEFINRNLVDTRYATAELTNYLKAYFSANNMNVKVKTINGSFTDYLRKVWKFKKERNH
GYKHHAEDALIIANADFLFKENKKLKAVNSVLEKPEIETKQLDIQVDSEDNYSEMFIIPKQVQ
DIKDFRNFKYSHRVDKKPNRKLINDTLYSTRKKDNSTYIVQTIKDIYAKDNTTLKKQFDKSPE
KFLMYQHDPRTFEKLEVIMKQYANEKNPLAKYHEETGEYLTKYSKKNNGPIVKSLKYIGNK
LGSHLDVTHQFKSSTKKLVKLSIKPYRFDVYLTDKGYKFITISYLDVLKKDNYYYIPEQKYDK
LKLGKAIDKNAKFIASFYKNDLIKLDGEIYKIIGVNSDTRNMIELDLPDIRYKEYCELNNIKGEP
HIKKTIGKKVNSIEKLTTDVLGNVFTNTQYTKPQLLFKRGN.

[0235] In some embodiments, the Cas protein is any of the engineered Cas proteins disclosed in Schmidt et al., 2021, Nature Communications, “Improved CRISPR genome editing using small highly active and specific engineered RNA-guided nucleases.”

[0236] In some embodiments, the Cas9 comprises an amino acid sequence that is at least 80%, 85%, 90%, 91%, 92%, 93%, 94%, 95%, 96%, 97%, 98%, 99% or 100% identical to the sequence of SEQ ID NO: 7021 (designated herein as sRGN1):

MNQKFILGLDIGITSVGYGLIDYETKNIIDAGVRLFPEANVENNE
GRRSKRGSRRLKRRRIHRLDRVKHLLAEYDLLDLTNIPKSTNPYQ
TRVKGLNEKLSKDELVIALLHIAKRRGIHNVDVAADKEETASDSL
STKDQINKNAKFLESRYVCELQKERLENEGHVRGVENRFLTKDIV
REAKKIIDTQMQYYPEIDETFKEKYISLVETRREYFEGPGKGSPF
GWEGNIKKWFEQMMGHCTYFPEELRSVKYSYSAELFNALNDLNNL
VITRDEDAKLNYGEKFQIIENVFKQKKTPNLKQIAIEIGVHETEI
KGYRVNKSGTPEFTEFKLYHDLKSIVFDKSILENEAILDQIAEIL
TIYQDEQSIKEELNKLPEILNEQDKAEIAKLIGYNGTHRLSLKCI
HLINEELWQTSRNQMEIFNYLNIKPNKVDLSEQNKIPKDMVNDFI
LSPVVKRTFIQSINVINKVIEKYGIPEDIIIELARENNSDDRKKF
INNLQKKNEATRKRINEIIGQTGNQNAKRIVEKIRLHDQQEGKCL
YSLKDIPLEDLLRNPNNYDIDHIIPRSVSFDDSMHNKVLVRREQN
AKKNNQTPYQYLTSGYADIKYSVFKQHVLNLAENKDRMTKKKREY
LLEERDINKFEVQKEFINRNLVDTRYATRELTNYLKAYFSANNMN
VKVKTINGSFTDYLRKVWKFKKERNHGYKHHAEDALIIANADFLF
KENKKLKAVNSVLEKPEIETKQLDIQVDSEDNYSEMFIIPKQVQD
IKDFRNFKYSHRVDKKPNRQLINDTLYSTRKKDNSTYIVQTIKDI
YAKDNTTLKKQFDKSPEKFLMYQHDPRTFEKLEVIMKQYANEKNP
LAKYHEETGEYLTKYSKKNNGPIVKSLKYIGNKLGSHLDVTHQFK
SSTKKLVKLSIKPYRFDVYLTDKGYKFITISYLDVLKKDNYYYIP
EQKYDKLKLGKAIDKNAKFIASFYKNDLIKLDGEIYKIIGVNSDT
RNMIELDLPDIRYKEYCELNNIKGEPRIKKTIGKKVNSIEKLTTD
VLGNVFTNTQYTKPQLLFKRGN.

[0237] In some embodiments, the Cas9 comprises an amino acid sequence that is at least 80%, 85%, 90%, 91%, 92%, 93%, 94%, 95%, 96%, 97%, 98%, 99% or 100% identical to the sequence of SEQ ID NO: 7022 (designated herein as sRGN2):

MNQKFILGLDIGITSVGYGLIDYETKNIIDAGVRLFPEANVENNE
GRRSKRGSRRLKRRRIHRLERVKSLLSEYKIISGLAPTNNQPYNI
RVKGLTEQLTKDELAVALLHIAKRRGIHKIDVIDSNDDVGNELST
KEQLNKNSKLLKDKFVCQIQLERMNEGQVRGEKNRFKTADIIKEI
IQLLNVQKNFHQLDENFINKYIELVEMRREYFEGPGQGSPFGWNG
DLKKWYEMLMGHCTYFPQELRSVKYAYSADLFNALNDLNNLIIQR
DNSEKLEYHEKYHIIENVFKQKKKPTLKQIAKEIGVNPEDIKGYR
ITKSGTPEFTEFKLYHDLKSVLFDQSILENEDVLDQIAEILTIYQ
DKDSIKSKLTELDILLNEEDKENIAQLTGYNGTHRLSLKCIRLVL
EEQWYSSRNQMEIFTHLNIKPKKINLTAANKIPKAMIDEFILSPV
VKRTFIQSINVINKVIEKYGIPEDIIIELARENNSDDRKKFINNL
QKKNEATRKRINEIIGQTGNQNAKRIVEKIRLHDQQEGKCLYSLE
SIALMDLLNNPQNYEVDHIIPRSVAFDNSIHNKVLVKQIENSKKG
NRTPYQYLNSSDAKLSYNQFKQHILNLSKSKDRISKKKKDYLLEE
RDINKFEVQKEFINRNLVDTRYATRELTSYLKAYFSANNMDVKVK
TINGSFTNHLRKVWRFDKYRNHGYKHHAEDALIIANADFLFKENK
KLKAVNSVLEKPEIETKQLDIQVDSEDNYSEMFIIPKQVQDIKDF
RNFKYSHRVDKKPNRQLINDTLYSTRKKDNSTYIVQTIKDIYAKD
NTTLKKQFDKSPEKFLMYQHDPRTFEKLEVIMKQYANEKNPLAKY
HEETGEYLTKYSKKNNGPIVKSLKYIGNKLGSHLDVTHQFKSSTK
KLVKLSIKPYRFDVYLTDKGYKFITISYLDVLKKDNYYYIPEQKY
DKLKLGKAIDKNAKFIASFYKNDLIKLDGEIYKIIGVNSDTRNMI
ELDLPDIRYKEYCELNNIKGEPRIKKTIGKKVNSIEKLTTDVLGN
VFTNTQYTKPQLLFKRGN.

[0238] In some embodiments, the Cas9 comprises an amino acid sequence that is at least 80%, 85%, 90%, 91%, 92%, 93%, 94%, 95%, 96%, 97%, 98%, 99% or 100% identical to the sequence of SEQ ID NO: 7023 (designated herein as sRGN3):

MNQKFILGLDIGITSVGYGLIDYETKNIIDAGVRLFPEANVENNE
GRRSKRGSRRLKRRRIHRLERVKLLLTEYDLINKEQIPTSNNPYQ
IRVKGLSEILSKDELAIALLHLAKRRGIHNVDVAADKEETASDSL
STKDQINKNAKFLESRYVCELQKERLENEGHVRGVENRFLTKDIV
REAKKIIDTQMQYYPEIDETFKEKYISLVETRREYFEGPGQGSPF
GWNGDLKKWYEMLMGHCTYFPQELRSVKYAYSADLFNALNDLNNL
IIQRDNSEKLEYHEKYHIIENVFKQKKKPTLKQIAKEIGVNPEDI
KGYRITKSGTPEFTSFKLFHDLKKVVKDHAILDDIDLLNQIAEIL
TIYQDKDSIVAELGQLEYLMSEADKQSISELTGYTGTHSLSLKCM
NMIIDELWHSSMNQMEVFTYLNMRPKKYELKGYQRIPTDMIDDAI
LSPVVKRTFIQSINVINKVIEKYGIPEDIIIELARENNSDDRKKF
INNLQKKNEATRKRINEIIGQTGNQNAKRIVEKIRLHDQQEGKCL
YSLESIPLEDLLNNPNHYEVDHIIPRSVSFDNSYHNKVLVKQSEN
SKKSNLTPYQYFNSGKSKLSYNQFKQHILNLSKSQDRISKKKKEY
LLEERDINKFEVQKEFINRNLVDTRYATRELTNYLKAYFSANNMN
VKVKTINGSFTDYLRKVWKFKKERNHGYKHHAEDALIIANADFLF
KENKKLKAVNSVLEKPEIETKQLDIQVDSEDNYSEMFIIPKQVQD
IKDFRNFKYSHRVDKKPNRQLINDTLYSTRKKDNSTYIVQTIKDI
YAKDNTTLKKQFDKSPEKFLMYQHDPRTFEKLEVIMKQYANEKNP
LAKYHEETGEYLTKYSKKNNGPIVKSLKYIGNKLGSHLDVTHQFK
SSTKKLVKLSIKPYRFDVYLTDKGYKFITISYLDVLKKDNYYYIP
EQKYDKLKLGKAIDKNAKFIASFYKNDLIKLDGEIYKIIGVNSDT
RNMIELDLPDIRYKEYCELNNIKGEPRIKKTIGKKVNSIEKLTTD
VLGNVFTNTQYTKPQLLFKRGN.

[0239] In some embodiments, the Cas9 comprises an amino acid sequence that is at least 80%, 85%, 90%, 91%, 92%, 93%, 94%, 95%, 96%, 97%, 98%, 99% or 100% identical to the sequence of

MNQKFILGLDIGITSVGYGLIDYETKNIIDAGVRLFPEANVENNE
GRRSKRGSRRLKRRRIHRLERVKLLLTEYDLINKEQIPTSNNPYQ
IRVKGLSEILSKDELAIALLHLAKRRGIHNVDVAADKEETASDSL
STKDQINKNAKFLESRYVCELQKERLENEGHVRGVENRFLTKDIV
REAKKIIDTQMQYYPEIDETFKEKYISLVETRREYFEGPGQGSPF
GWNGDLKKWYEMLMGHCTYFPQELRSVKYAYSADLFNALNDLNNL
IIQRDNSEKLEYHEKYHIIENVFKQKKKPTLKQIAKEIGVNPEDI
KGYRITKSGTPEFTSFKLFHDLKKVVKDHAILDDIDLLNQIAEIL
TIYQDKDSIVAELGQLEYLMSEADKQSISELTGYTGTHSLSLKCM
NMIIDELWHSSMNQMEVFTYLNMRPKKYELKGYQRIPTDMIDDAI
LSPVVKRTFIQSINVINKVIEKYGIPEDIIIELARENNSDDRKKF
INNLQKKNEATRKRINEIIGQTGNQNAKRIVEKIRLHDQQEGKCL
YSLESIPLEDLLNNPNHYEVDHIIPRSVSFDNSYHNKVLVKQSEN
SKKSNLTPYQYFNSGKSKLSYNQFKQHILNLSKSQDRISKKKKEY
LLEERDINKFEVQKEFINRNLVDTRYATRELTNYLKAYFSANNMN
VKVKTINGSFTDYLRKVWKFKKERNHGYKHHAEDALIIANADFLF
KENKKLKAVNSVLEKPEIETKQLDIQVDSEDNYSEMFIIPKQVQD
IKDFRNFKYSHRVDKKPNRQLINDTLYSTRKKDNSTYIVQTIKDI
YAKDNTTLKKQFDKSPEKFLMYQHDPRTFEKLEVIMKQYANEKNP
LAKYHEETGEYLTKYSKKNNGPIVKSLKYIGNKLGSHLDVTHQFK
SSTKKLVKLSIKNYRFDVYLTEKGYKFVTIAYLNVFKKDNYYYIP
KDKYQELKEKKKIKDTDQFIASFYKNDLIKLNGDLYKIIGVNSDD
RNIIELDYYDIKYKDYCEINNIKGEPRIKKTIGKKTESIEKFTTD
VLGNLYLHSTEKAPQLIFKRGL.

[0240] In some embodiments, the Cas9 comprises an amino acid sequence that is encoded by a nucleic acid molecule at least 80%, 85%, 90%, 91%, 92%, 93%, 94%, 95%, 96%, 97%, 98%, 99% or 100% identical to the sequence of SEQ ID NO: 1 (an exemplary nucleic acid molecule encoding sRGN3. 1):

ATGAATCAGAAATTCATCCTGGGACTGGACATCGGCATTACCTCT
GTGGGCTACGGCTTGATTGACTACGAGACCAAGAACATCATCGAC
GCCGGCGTTAGACTGTTTCCTGAGGCCAATGTGGAAAACAACGAG
GGCAGACGGTCTAAGCGGGGCTCTAGACGACTGAAAAGAAGAAGA
ATCCACAGACTGGAAAGAGTGAAGCTGCTGCTGACCGAGTACGAC
CTGATCAATAAGGAACAGATCCCTACAAGCAACAACCCCTACCAG
ATTAGAGTGAAGGGCCTGAGCGAGATCCTGAGCAAAGACGAGCTG
GCCATCGCCCTGCTGCACCTGGCCAAGCGGAGGGGCATCCACAAC
GTGGATGTGGCCGCCGACAAGGAGGAAACCGCCAGCGACTCCCTG
AGCACCAAAGATCAGATCAACAAGAATGCCAAGTTCCTGGAGAGC
AGATACGTGTGCGAGCTGCAGAAGGAGAGATTGGAGAACGAGGGC
CACGTGCGGGGCGTGGAGAATAGATTCCTGACAAAAGATATCGTG
CGGGAAGCCAAGAAGATCATCGACACCCAGATGCAGTACTATCCT
GAAATCGACGAAACCTTCAAGGAGAAGTACATCAGCCTGGTCGAA
ACCAGACGCGAGTATTTCGAGGGCCCCGGACAGGGCTCTCCTTTC
GGCTGGAACGGCGATCTGAAGAAGTGGTACGAGATGCTGATGGGA
CACTGCACCTACTTCCCTCAAGAGCTGAGATCTGTGAAGTACGCC
TACAGCGCCGATCTGTTCAACGCCCTGAACGATCTGAACAACCTT
ATCATCCAGCGGGACAATTCTGAGAAGCTGGAATACCACGAGAAA
TATCATATCATCGAGAACGTCTTTAAACAAAAGAAAAAGCCTACC
CTGAAGCAGATCGCCAAGGAGATCGGAGTGAATCCTGAGGATATC
AAAGGCTACAGAATCACAAAGTCCGGCACCCCTGAGTTCACCAGC
TTTAAGCTGTTCCACGACCTGAAGAAGGTCGTGAAAGACCACGCC
ATCCTCGATGACATCGATCTGCTGAACCAGATCGCTGAGATCCTG
ACAATCTACCAGGACAAAGATTCTATCGTGGCTGAACTGGGACAG
CTGGAATACCTTATGAGCGAGGCCGACAAGCAAAGCATCTCCGAA
CTGACCGGCTACACGGGCACCCATAGCCTGAGCCTGAAGTGTATG
AACATGATCATCGATGAGCTGTGGCACTCTAGCATGAACCAGATG
GAAGTTTTCACCTACCTGAACATGCGGCCTAAGAAGTACGAGCTG
AAGGGCTACCAGAGAATCCCCACCGATATGATCGACGACGCCATC
CTGAGCCCCGTGGTGAAAAGAACATTCATCCAGAGCATCAACGTG
ATCAACAAGGTGATCGAGAAGTACGGCATTCCAGAGGACATCATC
ATCGAGCTGGCCAGAGAAAACAACAGCGACGATAGAAAGAAGTTT
ATCAACAACCTGCAGAAAAAAAACGAGGCCACCCGGAAGAGAATT
AATGAGATCATCGGCCAGACAGGCAACCAGAACGCCAAAAGGATC
GTGGAAAAAATCAGACTGCACGACCAGCAGGAGGGCAAGTGCCTG
TACTCTCTGGAAAGCATCCCCCTGGAGGACCTGCTGAACAATCCA
AATCACTACGAGGTGGACCACATCATCCCTAGAAGCGTCAGCTTC
GACAACAGCTACCACAACAAGGTGCTGGTGAAGCAGAGCGAAAAC
AGTAAGAAATCCAACCTGACACCTTACCAGTACTTTAACAGCGGC
AAGAGCAAGCTGAGCTACAACCAGTTCAAGCAGCACATCCTGAAC
CTGTCCAAATCTCAGGATAGAATCTCCAAGAAAAAGAAGGAATAC
CTGCTGGAGGAGAGAGATATCAACAAGTTCGAAGTCCAAAAGGAG
TTCATCAACAGGAACCTGGTGGACACCCGGTACGCCACAAGAGAG
CTGACAAACTACCTGAAAGCCTACTTCAGCGCTAACAACATGAAC
GTGAAGGTGAAAACCATCAATGGAAGTTTCACAGACTACCTTCGG
AAGGTGTGGAAGTTCAAGAAGGAACGGAATCACGGCTACAAGCAC
CACGCAGAGGACGCCCTGATTATAGCTAATGCCGATTTCCTGTTC
AAAGAAAACAAGAAGCTGAAAGCCGTGAACAGCGTTCTGGAAAAG
CCTGAAATTGAGACCAAGCAACTGGATATACAGGTGGACAGCGAG
GACAACTACTCCGAGATGTTCATCATCCCTAAACAGGTGCAGGAC
ATCAAAGACTTCAGAAATTTCAAGTACAGCCACAGAGTGGACAAG
AAACCCAACCGGCAGCTGATCAATGACACCCTGTATAGCACCCGC
AAGAAGGATAACAGCACCTACATCGTCCAGACCATCAAGGACATC
TACGCTAAGGACAACACCACCCTGAAAAAGCAATTTGATAAGTCC
CCCGAAAAGTTTCTGATGTACCAACACGATCCTAGAACCTTCGAA
AAGTTGGAGGTGATCATGAAGCAATATGCCAACGAGAAGAACCCA
CTGGCCAAGTACCATGAGGAGACAGGAGAATACCTGACCAAGTAT
TCTAAGAAGAATAACGGCCCCATCGTGAAGTCCCTGAAGTACATT
GGGAACAAACTCGGAAGCCACCTGGACGTGACGCACCAGTTCAAG
AGCAGCACCAAGAAGCTAGTGAAACTGAGCATCAAGAACTACAGA
TTCGACGTGTACCTGACAGAAAAGGGCTACAAATTTGTGACCATC
GCTTACCTGAATGTGTTCAAAAAGGACAATTATTACTACATCCCA
AAGGACAAGTACCAGGAGCTTAAAGAGAAAAAAAAGATCAAGGAT
ACCGACCAGTTTATCGCTAGCTTCTACAAGAACGACCTGATTAAG
CTGAACGGCGACCTGTACAAGATCATCGGCGTGAACTCTGACGAC
CGGAACATAATAGAGCTGGATTATTATGACATCAAGTACAAGGAC
TACTGCGAGATCAACAACATCAAGGGCGAGCCTAGAATCAAAAAG
ACCATCGGGAAGAAAACCGAGTCTATCGAAAAGTTTACAACAGAC
GTGCTGGGCAACCTGTACCTGCACAGCACGGAAAAGGCCCCTCAG
CTCATCTTCAAGAGAGGCCTG

[0241] In some embodiments, the Cas9 comprises an amino acid sequence that is at least 80%, 85%, 90%, 91%, 92%, 93%, 94%, 95%, 96%, 97%, 98%, 99% or 100% identical to the sequence of SEQ ID NO: 7025 (designated herein as sRGN3.2):

MNQKFILGLDIGITSVGYGLIDYETKNIIDAGVRLFPEANVENNE
GRRSKRGSRRLKRRRIHRLERVKLLLTEYDLINKEQIPTSNNPYQ
IRVKGLSEILSKDELAIALLHLAKRRGIHNVDVAADKEETASDSL
STKDQINKNAKFLESRYVCELQKERLENEGHVRGVENRFLTKDIV
REAKKIIDTQMQYYPEIDETFKEKYISLVETRREYFEGPGQGSPF
GWNGDLKKWYEMLMGHCTYFPQELRSVKYAYSADLFNALNDLNNL
IIQRDNSEKLEYHEKYHIIENVFKQKKKPTLKQIAKEIGVNPEDI
KGYRITKSGTPEFTSFKLFHDLKKVVKDHAILDDIDLLNQIAEIL
TIYQDKDSIVAELGQLEYLMSEADKQSISELTGYTGTHSLSLKCM
NMIIDELWHSSMNQMEVFTYLNMRPKKYELKGYQRIPTDMIDDAI
LSPVVKRTFIQSINVINKVIEKYGIPEDIIIELARENNSDDRKKF
INNLQKKNEATRKRINEIIGQTGNQNAKRIVEKIRLHDQQEGKCL
YSLESIPLEDLLNNPNHYEVDHIIPRSVSFDNSYHNKVLVKQSEN
SKKSNLTPYQYFNSGKSKLSYNQFKQHILNLSKSQDRISKKKKEY
LLEERDINKFEVQKEFINRNLVDTRYATRELTNYLKAYFSANNMN
VKVKTINGSFTDYLRKVWKFKKERNHGYKHHAEDALIIANADFLF
KENKKLKAVNSVLEKPEIETKQLDIQVDSEDNYSEMFIIPKQVQD
IKDFRNFKFSHRVDKKPNRQLINDTLYSTRMKDEHDYIVQTITDI
YGKDNTNLKKQFNKNPEKFLMYQNDPKTFEKLSIIMKQYSDEKNP
LAKYYEETGEYLTKYSKKNNGPIVKKIKLLGNKVGNHLDVTNKYE
NSTKKLVKLSIKNYRFDVYLTEKGYKFVTIAYLNVFKKDNYYYIP
KDKYQELKEKKKIKDTDQFIASFYKNDLIKLNGDLYKIIGVNSDD
RNIIELDYYDIKYKDYCEINNIKGEPRIKKTIGKKTESIEKFTTD
VLGNLYLHSTEKAPQLIFKRGL.

[0242] In some embodiments, the Cas9 comprises an amino acid sequence that is at least 80%, 85%, 90%, 91%, 92%, 93%, 94%, 95%, 96%, 97%, 98%, 99% or 100% identical to the sequence of SEQ ID NO: 7026 (designated herein as sRGN3.3):

MNQKFILGLDIGITSVGYGLIDYETKNIIDAGVRLFPEANVENNE
GRRSKRGSRRLKRRRIHRLERVKLLLTEYDLINKEQIPTSNNPYQ
IRVKGLSEILSKDELAIALLHLAKRRGIHNVDVAADKEETASDSL
STKDQINKNAKFLESRYVCELQKERLENEGHVRGVENRFLTKDIV
REAKKIIDTQMQYYPEIDETFKEKYISLVETRREYFEGPGQGSPF
GWNGDLKKWYEMLMGHCTYFPQELRSVKYAYSADLFNALNDLNNL
IIQRDNSEKLEYHEKYHIIENVFKQKKKPTLKQIAKEIGVNPEDI
KGYRITKSGTPEFTSFKLFHDLKKVVKDHAILDDIDLLNQIAEIL
TIYQDKDSIVAELGQLEYLMSEADKQSISELTGYTGTHSLSLKCM
NMIIDELWHSSMNQMEVFTYLNMRPKKYELKGYQRIPTDMIDDAI
LSPVVKRTFIQSINVINKVIEKYGIPEDIIIELARENNSDDRKKF
INNLQKKNEATRKRINEIIGQTGNQNAKRIVEKIRLHDQQEGKCL
YSLESIPLEDLLNNPNHYEVDHIIPRSVSFDNSYHNKVLVKQSEN
SKKSNLTPYQYFNSGKSKLSYNQFKQHILNLSKSQDRISKKKKEY
LLEERDINKFEVQKEFINRNLVDTRYATRELTSYLKAYFSANNMD
VKVKTINGSFTNHLRKVWRFDKYRNHGYKHHAEDALIIANADFLF
KENKKLQNTNKILEKPTIENNTKKVTVEKEEDYNNVFETPKLVED
IKQYRDYKFSHRVDKKPNRQLINDTLYSTRMKDEHDYIVQTITDI
YGKDNTNLKKQFNKNPEKFLMYQNDPKTFEKLSIIMKQYSDEKNP
LAKYYEETGEYLTKYSKKNNGPIVKKIKLLGNKVGNHLDVTNKYE
NSTKKLVKLSIKNYRFDVYLTEKGYKFVTIAYLNVFKKDNYYYIP
KDKYQELKEKKKIKDTDQFIASFYKNDLIKLNGDLYKIIGVNSDD
RNIIELDYYDIKYKDYCEINNIKGEPRIKKTIGKKTESIEKFTTD
VLGNLYLHSTEKAPQLIFKRGL.

[0243] In some embodiments, the Cas9 comprises an amino acid sequence that is encoded by a nucleic acid molecule at least 80%, 85%, 90%, 91%, 92%, 93%, 94%, 95%, 96%, 97%, 98%, 99% or 100% identical to the sequence of SEQ ID NO: 2 (an exemplary nucleic acid molecule encoding sRGN3.3):

AACCAGAAGTTTATCCTGGGCCTGGATATCGGCATCACATCCGTG
GGCTACGGCCTGATTGATTACGAAACCAAGAACATCATTGATGCC
GGCGTCCGGCTTTTCCCTGAAGCTAACGTGGAAAACAATGAGGGC
AGACGGAGCAAGAGAGGCAGCAGACGGCTGAAGCGGAGAAGAATC
CATAGACTCGAACGGGTGAAGCTGCTGCTGACCGAGTACGACCTG
ATCAACAAGGAGCAGATCCCCACCAGCAACAACCCATACCAGATC
AGAGTGAAAGGCCTTTCTGAGATTCTGAGCAAGGATGAGCTGGCT
ATCGCTCTGCTCCACCTGGCCAAGAGAAGGGGAATCCACAACGTT
GACGTGGCCGCCGATAAGGAAGAGACCGCCAGCGATAGCCTGAGC
ACCAAGGACCAGATCAACAAGAACGCCAAGTTCCTGGAAAGCAGA
TACGTGTGCGAGCTGCAAAAAGAGAGACTGGAAAATGAGGGCCAT
GTGCGGGGCGTTGAGAACAGATTCCTGACCAAAGACATCGTCAGA
GAGGCCAAGAAAATTATTGACACCCAGATGCAGTACTATCCTGAG
ATAGACGAGACCTTTAAGGAAAAGTACATCAGCCTGGTGGAAACA
AGAAGAGAATACTTCGAAGGACCTGGCCAGGGCTCCCCTTTCGGC
TGGAACGGCGACCTGAAGAAGTGGTACGAGATGCTGATGGGCCAC
TGCACCTACTTCCCCCAGGAGCTGCGGAGCGTGAAGTACGCTTAC
AGCGCCGACCTGTTCAATGCCCTGAACGACCTGAACAATCTTATC
ATCCAAAGAGATAACAGCGAGAAATTAGAATACCACGAGAAGTAC
CACATCATCGAGAATGTGTTCAAGCAAAAGAAGAAGCCTACCCTG
AAGCAGATCGCCAAAGAGATCGGCGTGAACCCTGAGGACATCAAG
GGCTATCGGATCACCAAGTCCGGCACCCCTGAATTCACCAGCTTC
AAGCTGTTTCACGACCTCAAAAAGGTCGTGAAGGACCACGCCATC
CTGGACGACATCGATCTGCTGAATCAGATCGCCGAGATCCTGACC
ATCTACCAGGACAAGGACTCTATCGTGGCCGAGCTTGGACAGCTG
GAGTACCTGATGAGCGAGGCTGACAAGCAGAGCATCAGCGAGCTG
ACCGGCTACACCGGAACCCACAGCCTGTCCCTGAAGTGCATGAAC
ATGATCATCGACGAGCTGTGGCACTCTAGCATGAACCAGATGGAA
GTGTTCACCTACCTGAACATGAGACCTAAGAAGTACGAACTGAAG
GGTTACCAGAGAATCCCAACCGACATGATCGACGACGCCATCCTG
AGCCCCGTGGTGAAGCGGACCTTTATCCAGAGCATCAATGTGATC
AACAAGGTGATCGAGAAATACGGCATCCCCGAGGACATCATCATC
GAACTGGCCAGAGAGAATAACTCTGATGACCGGAAGAAGTTCATC
AACAACCTGCAGAAGAAGAACGAAGCCACCAGAAAGCGCATCAAC
GAGATCATCGGCCAAACAGGGAATCAGAACGCCAAGAGGATCGTG
GAAAAGATTCGGCTGCACGACCAGCAGGAGGGAAAATGCCTGTAC
AGCCTGGAAAGCATCCCCCTGGAAGATCTACTGAACAACCCCAAC
CACTACGAGGTGGATCACATCATCCCTAGAAGCGTGTCCTTTGAC
AACAGTTACCACAACAAGGTGCTGGTGAAGCAATCCGAGAACTCG
AAGAAGAGCAACCTGACACCTTACCAGTACTTTAACAGCGGCAAG
TCCAAGCTGTCTTATAACCAGTTCAAGCAGCACATCCTCAACCTG
TCAAAGTCTCAGGACAGAATCTCTAAGAAGAAGAAGGAGTATCTG
CTGGAAGAGCGGGACATCAACAAGTTCGAGGTGCAGAAAGAGTTC
ATTAACAGAAACCTGGTCGACACCCGGTACGCCACACGCGAACTG
ACAAGCTACCTGAAGGCCTACTTCTCCGCCAACAATATGGACGTG
AAGGTCAAGACCATCAATGGCAGCTTCACAAATCACCTGAGAAAG
GTCTGGCGGTTCGACAAGTACAGAAACCACGGCTACAAGCACCAC
GCCGAGGATGCTCTGATTATCGCCAACGCCGACTTCCTGTTCAAG
GAAAACAAAAAACTGCAGAACACCAACAAGATCCTGGAAAAACCT
ACAATCGAGAACAACACAAAGAAAGTGACAGTGGAAAAAGAGGAA
GATTACAACAACGTGTTTGAGACACCTAAGCTGGTTGAGGATATC
AAGCAGTACCGGGACTATAAGTTTAGCCACAGAGTGGACAAGAAA
CCTAACAGGCAGCTGATCAACGACACTCTGTACAGCACAAGAATG
AAAGATGAGCACGATTACATCGTGCAGACCATTACCGACATCTAC
GGCAAGGACAACACCAATCTGAAGAAGCAGTTCAACAAAAATCCC
GAGAAGTTCCTGATGTACCAAAATGACCCTAAGACATTCGAGAAG
CTGAGCATCATCATGAAACAGTACTCTGATGAGAAGAACCCACTG
GCCAAGTACTACGAGGAAACAGGCGAATACCTGACCAAGTACTCT
AAGAAGAACAACGGCCCTATCGTGAAGAAGATCAAACTGCTGGGC
AACAAAGTGGGAAATCATCTGGATGTGACCAATAAATACGAGAAC
TCTACAAAGAAACTGGTGAAGCTGAGCATTAAGAACTACAGATTC
GACGTCTACCTGACAGAAAAGGGATACAAGTTCGTGACCATCGCC
TACCTGAACGTGTTCAAGAAAGACAACTACTACTACATCCCAAAA
GACAAGTACCAAGAGTTAAAAGAGAAGAAGAAGATAAAGGATACC
GACCAGTTTATCGCTTCTTTCTACAAGAACGACCTGATCAAGCTG
AACGGTGATCTGTACAAAATCATCGGAGTGAATAGCGATGACAGA
AATATCATCGAACTGGATTACTATGACATCAAGTACAAAGATTAT
TGTGAAATCAACAACATCAAGGGAGAGCCCAGAATTAAGAAAACC
ATCGGCAAGAAAACAGAGAGCATCGAGAAATTCACCACAGATGTG
CTGGGCAACCTGTACCTGCACAGCACAGAGAAAGCCCCTCAGCTC
ATCTTCAAGAGAGGCCTG

[0244] In some embodiments, the Cas9 comprises an amino acid sequence that is at least 80%, 85%, 90%, 91%, 92%, 93%, 94%, 95%, 96%, 97%, 98%, 99% or 100% identical to the sequence of SEQ ID NO: 7027 (designated herein as sRGN4):

MNQKFILGLDIGITSVGYGLIDYETKNIIDAGVRLFPEANVENNE
GRRSKRGSRRLKRRRIHRLERVKKLLEDYNLLDQSQIPQSTNPYA
IRVKGLSEALSKDELVIALLHIAKRRGIHNINVSSEDEDASNELS
TKEQINRNNKLLKDKYVCEVQLQRLKEGQIRGEKNRFKTTDILKE
IDQLLKVQKDYHNLDIDFINQYKEIVETRREYFEGPGKGSPYGWE
GDPKAWYETLMGHCTYFPDELRSVKYAYSADLFNALNDLNNLVIQ
RDGLSKLEYHEKYHIIENVFKQKKKPTLKQIANEINVNPEDIKGY
RITKSGKPEFTSFKLFHDLKKVVKDHAILDDIDLLNQIAEILTIY
QDKDSIVAELGQLEYLMSEADKQSISELTGYTGTHSLSLKCMNMI
IDELWHSSMNQMEVFTYLNMRPKKYELKGYQRIPTDMIDDAILSP
VVKRTFIQSINVINKVIEKYGIPEDIIIELARENNSDDRKKFINN
LQKKNEATRKRINEIIGQTGNQNAKRIVEKIRLHDQQEGKCLYSL
ESIPLEDLLNNPNHYEVDHIIPRSVSFDNSYHNKVLVKQSENSKK
SNLTPYQYFNSGKSKLSYNQFKQHILNLSKSQDRISKKKKEYLLE
ERDINKFEVQKEFINRNLVDTRYATRELTNYLKAYFSANNMNVKV
KTINGSFTDYLRKVWKFKKERNHGYKHHAEDALIIANADFLFKEN
KKLKAVNSVLEKPEIETKQLDIQVDSEDNYSEMFIIPKQVQDIKD
FRNFKYSHRVDKKPNRQLINDTLYSTRKKDNSTYIVQTIKDIYAK
DNTTLKKQFDKSPEKFLMYQHDPRTFEKLEVIMKQYANEKNPLAK
YHEETGEYLTKYSKKNNGPIVKSLKYIGNKLGSHLDVTHQFKSST
KKLVKLSIKPYRFDVYLTDKGYKFITISYLDVLKKDNYYYIPEQK
YDKLKLGKAIDKNAKFIASFYKNDLIKLDGEIYKIIGVNSDTRNM
IELDLPDIRYKEYCELNNIKGEPRIKKTIGKKVNSIEKLTTDVLG
NVFTNTQYTKPQLLFKRGN.

[0245] In some embodiments, the Cas9 comprises an amino acid sequence that is encoded by a nucleic acid molecule at least 80%, 85%, 90%, 91%, 92%, 93%, 94%, 95%, 96%, 97%, 98%, 99% or 100% identical to the sequence of SEQ ID NO: 3 (an exemplary nucleic acid molecule encoding sRGN4

ATGAATCAAAAGTTTATCCTGGGTCTGGACATCGGCATCACATCT
GTGGGCTACGGCCTTATCGATTACGAGACCAAGAATATCATTGAT
GCTGGCGTACGGCTGTTCCCTGAGGCTAACGTGGAAAACAACGAG
GGTAGACGGAGCAAGAGAGGCAGCAGACGGCTGAAACGGCGTAGA
ATCCACCGGCTGGAGAGAGTGAAGAAGTTGCTGGAAGATTACAAC
TTGCTGGATCAATCCCAGATCCCCCAGAGCACTAATCCTTATGCT
ATCCGGGTGAAGGGCCTGTCTGAAGCCCTGAGCAAAGACGAGCTG
GTGATTGCCCTGCTGCACATCGCGAAGAGAAGAGGCATCCACAAT
ATCAATGTGTCCTCTGAGGATGAGGATGCCAGCAACGAGCTGAGC
ACTAAGGAACAGATCAATCGGAACAACAAGCTGCTGAAGGACAAG
TACGTGTGTGAAGTGCAGCTGCAGAGACTGAAGGAAGGCCAGATA
AGAGGCGAAAAGAACAGATTCAAGACAACAGACATCCTGAAAGAA
ATCGACCAGCTGCTGAAGGTCCAGAAGGACTACCACAACCTCGAC
ATCGATTTCATTAACCAGTACAAGGAAATCGTGGAAACCAGGAGA
GAGTACTTCGAGGGCCCTGGCAAGGGCTCCCCATACGGCTGGGAG
GGCGACCCCAAGGCCTGGTACGAAACCCTGATGGGCCACTGCACC
TACTTCCCCGACGAACTGAGAAGCGTCAAGTACGCCTACAGCGCC
GATCTGTTCAACGCCCTGAACGACCTGAACAACCTGGTGATCCAG
CGGGACGGCCTGAGCAAACTGGAGTACCATGAAAAGTATCATATC
ATCGAGAACGTGTTCAAGCAGAAGAAAAAACCTACCCTGAAGCAG
ATCGCCAACGAGATCAACGTGAACCCTGAGGACATTAAAGGCTAC
AGAATCACCAAAAGCGGCAAGCCAGAGTTCACCAGCTTCAAGCTG
TTTCACGACCTGAAGAAGGTCGTGAAAGACCACGCCATCCTGGAC
GACATCGATCTGCTTAACCAGATCGCTGAAATCCTCACAATCTAC
CAGGACAAGGACTCTATCGTGGCCGAGCTGGGACAGCTGGAATAC
CTGATGAGCGAGGCCGATAAGCAGAGCATCAGCGAGCTGACCGGC
TACACCGGAACCCACAGCCTGAGCCTGAAGTGTATGAACATGATC
ATCGACGAGCTGTGGCACAGCTCTATGAACCAGATGGAAGTATTC
ACCTACCTGAACATGAGACCTAAGAAGTACGAACTGAAGGGCTAT
CAGAGAATCCCTACAGACATGATCGACGATGCCATCCTGTCTCCT
GTGGTGAAGAGAACCTTCATCCAGTCTATCAACGTGATCAACAAG
GTGATCGAAAAGTACGGAATCCCTGAAGATATCATCATCGAACTG
GCCAGAGAGAACAACTCCGACGACAGAAAGAAATTCATCAACAAC
CTGCAGAAGAAGAATGAGGCCACACGGAAGCGGATTAATGAGATC
ATCGGCCAAACCGGCAACCAGAACGCCAAAAGAATCGTGGAAAAG
ATCCGGCTGCACGATCAGCAGGAGGGCAAATGCCTGTACAGCCTG
GAGAGCATCCCCCTGGAGGACCTGCTCAACAACCCCAACCACTAC
GAGGTGGATCACATCATCCCAAGATCTGTTAGCTTCGACAACAGC
TACCACAACAAGGTGCTGGTGAAGCAAAGCGAAAACTCTAAGAAA
TCTAACCTGACACCTTACCAGTACTTTAACAGCGGCAAGTCCAAG
CTGTCTTATAACCAGTTTAAGCAGCACATCCTGAACCTGAGCAAG
TCCCAGGATAGAATCAGCAAAAAAAAGAAGGAATACCTGCTGGAG
GAACGCGACATCAATAAATTTGAGGTGCAAAAGGAGTTCATCAAC
CGGAACCTGGTGGACACCCGGTACGCCACCAGAGAACTGACCAAC
TACCTGAAAGCCTACTTCAGCGCCAACAACATGAACGTGAAGGTG
AAAACCATCAACGGAAGCTTCACCGACTACCTGCGGAAGGTGTGG
AAGTTCAAGAAAGAGCGGAATCACGGCTATAAGCACCACGCTGAG
GACGCTCTGATCATCGCCAATGCCGATTTCCTGTTCAAGGAAAAC
AAGAAGTTAAAGGCCGTGAACTCTGTCCTGGAGAAGCCCGAGATC
GAGACAAAGCAGCTGGACATCCAAGTGGACTCAGAGGACAATTAC
TCTGAGATGTTCATCATCCCCAAGCAGGTGCAGGACATCAAGGAT
TTTAGAAATTTCAAGTACAGCCATAGAGTGGACAAGAAGCCCAAT
AGACAGCTGATCAACGATACACTGTACAGCACCAGAAAGAAGGAC
AACAGCACATATATCGTCCAGACCATCAAGGACATTTACGCAAAG
GATAACACCACACTGAAGAAGCAGTTCGACAAAAGCCCTGAGAAG
TTCCTGATGTACCAACACGACCCTCGGACCTTCGAGAAGTTAGAG
GTTATCATGAAACAGTACGCCAACGAGAAAAACCCTCTGGCCAAG
TACCACGAGGAAACCGGAGAATACCTGACAAAATATAGCAAGAAG
AACAACGGCCCCATCGTGAAAAGCCTGAAGTACATCGGCAACAAG
CTGGGCAGCCACCTGGACGTGACCCACCAGTTCAAGAGCAGCACC
AAGAAGCTGGTCAAGCTGAGCATCAAGCCTTATAGGTTCGACGTG
TACCTGACAGATAAGGGATACAAGTTCATCACCATCAGCTACCTG
GATGTTCTGAAAAAGGACAATTACTACTACATCCCTGAGCAGAAG
TACGACAAACTCAAGCTGGGCAAGGCCATCGATAAGAATGCCAAG
TTCATCGCATCTTTTTACAAGAACGACCTGATCAAACTGGACGGC
GAGATCTACAAGATCATAGGAGTGAACAGCGACACCAGGAATATG
ATCGAGCTCGATCTGCCTGACATCAGATACAAGGAATACTGCGAG
CTGAACAACATCAAGGGAGAGCCTAGAATCAAGAAAACCATCGGC
AAGAAGGTGAACAGCATCGAGAAACTTACAACAGATGTGCTCGGC
AACGTGTTCACCAACACCCAGTACACCAAGCCACAGCTGCTGTTT
AAGCGGGGGAAC

[0246] In some embodiments, the Cas9 comprises an amino acid sequence that is at least 80%, 85%, 90%, 91%, 92%, 93%, 94%, 95%, 96%, 97%, 98%, 99% or 100% identical to the sequence of SEQ ID NO: 7028 (designated herein as Staphylococcus hyicus Cas9 or ShyCas9):

MNNYILGLDIGITSVGYGIVDSDTREIKDAGVRLFPEANVDNNEG
RRSKRGARRLKRRRIHRLDRVKHLLAEYDLLDLTNIPKSTNPYQT
RVKGLNEKLSKDELVIALLHIAKRRGIHNVNVMMDDNDSGNELST
KDQLKKNAKALSDKYVCELQLERFEQDYKVRGEKNRFKTEDFVRE
ARKLLETQSKFFEIDQTFIMRYIELIETRREYFEGPGKGSPFGWE
GNIKKWFEQMMGHCTYFPEELRSVKYSYSAELFNALNDLNNLVIT
RDEDAKLNYGEKFQIIENVFKQKKTPNLKQIAIEIGVHETEIKGY
RVNKSGKPEFTQFKLYHDLKNIFKDPKYLNDIQLMDNIAEIITIY
QDAESIIKELNQLPELLSEREKEKISALSGYSGTHRLSLKCINLL
LDDLWESSLNQMELFTKLNLKPKKIDLSQQHKIPSKLVDDFILSP
VVKRAFIQSIQVVNAIIDKYGLPEDIIIELARENNSDDRRKFLNQ
LQKQNEETRKQVEKVLREYGNDNAKRIVQKIKLHNMQEGKCLYSL
KDIPLEDLLRNPHHYEVDHIIPRSVAFDNSMHNKVLVRADENSKK
GNRTPYQYLNSSESSLSYNEFKQHILNLSKTKDRITKKKREYLLE
ERDINKFDVQKEFINRNLVDTRYATRELTSLLKAYFSANNLDVKV
KTINGSFTNYLRKVWKFDKDRNKGYKHHAEDALIIANADFLFKHN
KKLRNINKVLDAPSKEVDKKRVTVQSEDEYNQIFEDTQKAQAIKK
FEIRKFSHRVDKKPNRQLINDTLYSTRNIDGIEYVVESIKDIYSV
NNDKVKTKFKKDPHRLLMYRNDPQTFEKFEKVFKQYESEKNPFAK
YYEETGEKIRKFSKTGQGPYINKIKYLRERLGRHCDVTNKYINSR
NKIVQLKIYSYRFDIYQYGNNYKMITISYIDLEQKSNYYYISREK
YEQKKKDKQIDDSYKFIGSFYKNDIINYNGEMYRVIGVNDSEKNK
IQLDMIDISIKDYMELNNIKKTGVIYKTIGKSTTHIEKYTTDILG
NLYKAAPPKKPQLIFK.

[0247] In some embodiments, the Cas9 comprises an amino acid sequence that is at least 80%, 85%, 90%, 91%, 92%, 93%, 94%, 95%, 96%, 97%, 98%, 99% or 100% identical to the sequence of SEQ ID NO: 7029 (designated herein as Staphylococcus microti Cas9 or Smi Cas9):

MEKDYILGLDIGIGSVGYGLIDYDTKSIIDAGVRLFPEANADNNL
GRRAKRGARRLKRRRIHRLERVKSLLSEYKIISGLAPTNNQPYNI
RVKGLTEQLTKDELAVALLHIAKRRGIHNVDVAADKEETASDSLS
TKDQINKNAKFLESRYVCELQKERLENEGHVRGVENRFLTKDIVR
EAKKIIDTQMQYYPEIDETFKEKYISLVETRREYYEGPGKGSPYG
WDADVKKWYQLMMGHCTYFPVEFRSVKYAYTADLYNALNDLNNLT
IARDDNPKLEYHEKYHIIENVFKQKRNPTLKQIAKEIGVNDINIS
GYRVTKSGKPQFTSFKLFHDLKKVVKDHAILDDIDLLNQIAEILT
IYQDKDSIVAELGQLEYLMSEADKQSISELTGYTGTHSLSLKCMN
MIIDELWHSSMNQMEVFTYLNMRPKKYELKGYQRIPTDMIDDAIL
SPVVKRSFKQAIGVVNAIIKKYGLPKDIIIELARESNSAEKSRYL
RAIQKKNEKTRERIEAIIKEYGNENAKGLVQKIKLHDAQEGKCLY
SLKDIPLEDLLRNPNNYDIDHIIPRSVSFDDSMHNKVLVRREQNA
KKNNQTPYQYLTSGYADIKYSVFKQHVLNLAENKDRMTKKKREYL
LEERNINKYDVQKEFINRNLVDTRYTTRELTTLLKTYFTINNLDV
KVKTINGSFTDFLRKRWGFKKNRDEGYKHHAEDALIIANADYLFK
EHKLLKEIKDVSDLAGDERNSNVKDEDQYEEVFGGYFKIEDIKKY
KIKKFSHRVDKKPNRQLINDTIYSTRVKDDKRYLINTLKNLYDKS
NGDLKERMQKDPESLLMYHHDPQTFEKLKIVMSQYENEKNPLAKY
FEETGQYLTKYAKHDNGPAIHKIKYYGNKLVEHLDITKNYHNPQN
KVVQLSQKSFRFDVYQTDKGYKFISIAYLTLKNEKNYYAISQEKY
DQLKSEKKISNNAVFIGSFYTSDIIEINNEKFRVIGVNSDKNNLI
EVDRIDIRQKEFIELEEEKKNNRIKVTIGRKTTNIEKFHTDILGN
MYKSKRPKAPQLVFKKG.

[0248] In some embodiments, the Cas9 comprises an amino acid sequence that is at least 80%, 85%, 90%, 91%, 92%, 93%, 94%, 95%, 96%, 97%, 98%, 99% or 100% identical to the sequence of SEQ ID NO: 7030 (designated herein as Staphylococcus pasteuri Cas9 or Spa Cas9):

MKEKYILGLDLGITSVGYGIINFETKKIIDAGVRLFPEANVDNNE
GRRSKRGSRRLKRRRIHRLERVKLLLTEYDLINKEQIPTSNNPYQ
IRVKGLSEILSKDELAIALLHLAKRRGIHNINVSSEDEDASNELS
TKEQINRNNKLLKDKYVCEVQLQRLKEGQIRGEKNRFKTTDILKE
IDQLLKVQKDYHNLDIDFINQYKEIVETRREYFEGPGQGSPFGWN
GDLKKWYEMLMGHCTYFPQELRSVKYAYSADLFNALNDLNNLIIQ
RDNSEKLEYHEKYHIIENVFKQKKKPTLKQIAKEIGVNPEDIKGY
RITKSGTPQFTEFKLYHDLKSIVFDKSILENEAILDQIAEILTIY
QDEQSIKEELNKLPEILNEQDKAEIAKLIGYNGTHRLSLKCIHLI
NEELWQTSRNQMEIFNYLNIKPNKVDLSEQNKIPKDMVNDFILSP
VVKRTFIQSINVINKVIEKYGIPEDIIIELARENNSDDRKKFINN
LQKKNEATRKRINEIIGQTGNQNAKRIVEKIRLHDQQEGKCLYSL
ESIALMDLLNNPQNYEVDHIIPRSVAFDNSIHNKVLVKQIENSKK
GNRTPYQYLNSSDAKLSYNQFKQHILNLSKSKDRISKKKKDYLLE
ERDINKFEVQKEFINRNLVDTRYATRELTSYLKAYFSANNMDVKV
KTINGSFTNHLRKVWRFDKYRNHGYKHHAEDALIIANADFLFKEN
KKLQNTNKILEKPTIENNTKKVTVEKEEDYNNVFETPKLVEDIKQ
YRDYKFSHRVDKKPNRQLINDTLYSTRMKDEHDYIVQTITDIYGK
DNTNLKKQFNKNPEKFLMYQNDPKTFEKLSIIMKQYSDEKNPLAK
YYEETGEYLTKYSKKNNGPIVKKIKLLGNKVGNHLDVTNKYENST
KKLVKLSIKNYRFDVYLTEKGYKFVTIAYLNVFKKDNYYYIPKDK
YQELKEKKKIKDTDQFIASFYKNDLIKLNGDLYKIIGVNSDDRNI
IELDYYDIKYKDYCEINNIKGEPRIKKTIGKKTESIEKFTTDVLG
NLYLHSTEKAPQLIFKRGL.

[0249] In some embodiments, the Cas protein comprises an amino acid sequence that is at least 80%, 85%, 90%, 91%, 92%, 93%, 94%, 95%, 96%, 97%, 98%, 99% or 100% identical to the sequence of SEQ ID NO: 7031 (designated herein as Cas12i1):

MSNKEKNASETRKAYTTKMIPRSHDRMKLLGNFMDYLMDGTPIFF
ELWNQFGGGIDRDIISGTANKDKISDDLLLAVNWFKVMPINSKPQ
GVSPSNLANLFQQYSGSEPDIQAQEYFASNFDTEKHQWKDMRVEY
ERLLAELQLSRSDMHHDLKLMYKEKCIGLSLSTAHYITSVMFGTG
AKNNRQTKHQFYSKVIQLLEESTQINSVEQLASIILKAGDCDSYR
KLRIRCSRKGATPSILKIVQDYELGTNHDDEVNVPSLIANLKEKL
GRFEYECEWKCMEKIKAFLASKVGPYYLGSYSAMLENALSPIKGM
TTKNCKFVLKQIDAKNDIKYENEPFGKIVEGFFDSPYFESDTNVK
WVLHPHHIGESNIKTLWEDLNAIHSKYEEDIASLSEDKKEKRIKV
YQGDVCQTINTYCEEVGKEAKTPLVQLLRYLYSRKDDIAVDKIID
GITFLSKKHKVEKQKINPVIQKYPSFNFGNNSKLLGKIISPKDKL
KHNLKCNRNQVDNYIWIEIKVLNTKTMRWEKHHYALSSTRFLEEV
YYPATSENPPDALAARFRTKTNGYEGKPALSAEQIEQIRSAPVGL
RKVKKRQMRLEAARQQNLLPRYTWGKDFNINICKRGNNFEVTLAT
KVKKKKEKNYKVVLGYDANIVRKNTYAAIEAHANGDGVIDYNDLP
VKPIESGFVTVESQVRDKSYDQLSYNGVKLLYCKPHVESRRSFLE
KYRNGTMKDNRGNNIQIDFMKDFEAIADDETSLYYFNMKYCKLLQ
SSIRNHSSQAKEYREEIFELLRDGKLSVLKLSSLSNLSFVMFKVA
KSLIGTYFGHLLKKPKNSKSDVKAPPITDEDKQKADPEMFALRLA
LEEKRLNKVKSKKEVIANKIVAKALELRDKYGPVLIKGENISDTT
KKGKKSSTNSFLMDWLARGVANKVKEMVMMHQGLEFVEVNPNFTS
HQDPFVHKNPENTFRARYSRCTPSELTEKNRKEILSFLSDKPSKR
PTNAYYNEGAMAFLATYGLKKNDVLGVSLEKFKQIMANILHQRSE
DQLLFPSRGGMFYLATYKLDADATSVNWNGKQFWVCNADLVAAYN
VGLVDIQKDFKKK.

[0250] In some embodiments, the Cas protein comprises an amino acid sequence that is at least 80%, 85%, 90%, 91%, 92%, 93%, 94%, 95%, 96%, 97%, 98%, 99% or 100% identical to the sequence of SEQ ID NO: 7032 (designated herein as Cas12i2):

MSSAIKSYKSVLRPNERKNQLLKSTIQCLEDGSAFFFKMLQGLFG
GITPEIVRFSTEQEKQQQDIALWCAVNWFRPVSQDSLTHTIASDN
LVEKFEEYYGGTASDAIKQYFSASIGESYYWNDCRQQYYDLCREL
GVEVSDLTHDLEILCREKCLAVATESNQNNSIISVLFGTGEKEDR
SVKLRITKKILEAISNLKEIPKNVAPIQEIILNVAKATKETFRQV
YAGNLGAPSTLEKFIAKDGQKEFDLKKLQTDLKKVIRGKSKERDW
CCQEELRSYVEQNTIQYDLWAWGEMFNKAHTALKIKSTRNYNFAK
QRLEQFKEIQSLNNLLVVKKLNDFFDSEFFSGEETYTICVHHLGG
KDLSKLYKAWEDDPADPENAIVVLCDDLKNNFKKEPIRNILRYIF
TIRQECSAQDILAAAKYNQQLDRYKSQKANPSVLGNQGFTWTNAV
ILPEKAQRNDRPNSLDLRIWLYLKLRHPDGRWKKHHIPFYDTRFF
QEIYAAGNSPVDTCQFRTPRFGYHLPKLTDQTAIRVNKKHVKAAK
TEARIRLAIQQGTLPVSNLKITEISATINSKGQVRIPVKFDVGRQ
KGTLQIGDRFCGYDQNQTASHAYSLWEVVKEGQYHKELGCFVRFI
SSGDIVSITENRGNQFDQLSYEGLAYPQYADWRKKASKFVSLWQI
TKKNKKKEIVTVEAKEKFDAICKYQPRLYKFNKEYAYLLRDIVRG
KSLVELQQIRQEIFRFIEQDCGVTRLGSLSLSTLETVKAVKGIIY
SYFSTALNASKNNPISDEQRKEFDPELFALLEKLELIRTRKKKQK
VERIANSLIQTCLENNIKFIRGEGDLSTTNNATKKKANSRSMDWL
ARGVFNKIRQLAPMHNITLFGCGSLYTSHQDPLVHRNPDKAMKCR
WAAIPVKDIGDWVLRKLSQNLRAKNIGTGEYYHQGVKEFLSHYEL
QDLEEELLKWRSDRKSNIPCWVLQNRLAEKLGNKEAVVYIPVRGG
RIYFATHKVATGAVSIVFDQKQVWVCNADHVAAANIALTVKGIGE
QSSDEENPDGSRIKLQLTS.

### Modified Guide RNAs

[0251] In some embodiments, the guide RNA is chemically modified. A guide RNA comprising one or more modified nucleosides or nucleotides is called a “modified” guide RNA or “chemically modified” guide RNA, to describe the presence of one or more non-naturally and/or naturally occurring components or configurations that are used instead of or in addition to the canonical A, G, C, and U residues. In some embodiments, a modified guide RNA is synthesized with a non-canonical nucleoside or nucleotide, is here called “modified.” Modified nucleosides and nucleotides can include one or more of: (i) alteration, e.g., replacement, of one or both of the non-linking phosphate oxygens and/or of one or more of the linking phosphate oxygens in the phosphodiester backbone linkage (an exemplary backbone modification); (ii) alteration, e.g., replacement, of a constituent of the ribose sugar, e.g., of the 2′ hydroxyl on the ribose sugar (an exemplary sugar modification); (iii) wholesale replacement of the phosphate moiety with “dephospho” linkers (an exemplary backbone modification); (iv) modification or replacement of a naturally occurring nucleobase, including with a non-canonical nucleobase (an exemplary base modification); (v) replacement or modification of the ribose-phosphate backbone (an exemplary backbone modification); (vi) modification of the 3′ end or 5′ end of the oligonucleotide, e.g., removal, modification or replacement of a terminal phosphate group or conjugation of a moiety, cap or linker (such 3′ or 5′ cap modifications may comprise a sugar and/or backbone modification); and (vii) modification or replacement of the sugar (an exemplary sugar modification).

[0252] Chemical modifications such as those listed above can be combined to provide modified guide RNAs comprising nucleosides and nucleotides (collectively “residues”) that can have two, three, four, or more modifications. For example, a modified residue can have a modified sugar and a modified nucleobase, or a modified sugar and a modified phosphodiester. In some embodiments, every base of a guide RNA is modified, e.g., all bases have a modified phosphate group, such as a phosphorothioate group. In certain embodiments, all, or substantially all, of the phosphate groups of a guide RNA molecule are replaced with phosphorothioate groups. In some embodiments, modified guide RNAs comprise at least one modified residue at or near the 5′ end of the RNA. In some embodiments, modified guide RNAs comprise at least one modified residue at or near the 3′ end of the RNA.

[0253] In some embodiments, the guide RNA comprises one, two, three or more modified residues. In some embodiments, at least 5% (e.g., at least 5%, at least 10%, at least 15%, at least 20%, at least 25%, at least 30%, at least 35%, at least 40%, at least 45%, at least 50%, at least 55%, at least 60%, at least 65%, at least 70%, at least 75%, at least 80%, at least 85%, at least 90%, at least 95%, or 100%) of the positions in a modified guide RNA are modified nucleosides or nucleotides.

[0254] Unmodified nucleic acids can be prone to degradation by, e.g., intracellular nucleases or those found in serum. For example, nucleases can hydrolyze nucleic acid phosphodiester bonds. Accordingly, in one aspect the guide RNAs described herein can contain one or more modified nucleosides or nucleotides, e.g., to introduce stability toward intracellular or serum-based nucleases. In some embodiments, the modified guide RNA molecules described herein can exhibit a reduced innate immune response when introduced into a population of cells, both in vivo and ex vivo. The term “innate immune response” includes a cellular response to exogenous nucleic acids, including single stranded nucleic acids, which involves the induction of cytokine expression and release, particularly the interferons, and cell death.

[0255] In some embodiments of a backbone modification, the phosphate group of a modified residue can be modified by replacing one or more of the oxygens with a different substituent. Further, the modified residue, e.g., modified residue present in a modified nucleic acid, can include the wholesale replacement of an unmodified phosphate moiety with a modified phosphate group as described herein. In some embodiments, the backbone modification of the phosphate backbone can include alterations that result in either an uncharged linker or a charged linker with unsymmetrical charge distribution.

[0256] Examples of modified phosphate groups include, phosphorothioate, phosphoroselenates, borano phosphates, borano phosphate esters, hydrogen phosphonates, phosphoroamidates, alkyl or aryl phosphonates and phosphotriesters. The phosphorous atom in an unmodified phosphate group is achiral. However, replacement of one of the non-bridging oxygens with one of the above atoms or groups of atoms can render the phosphorous atom chiral. The stereogenic phosphorous atom can possess either the “R” configuration (herein Rp) or the “S” configuration (herein Sp). The backbone can also be modified by replacement of a bridging oxygen, (i.e., the oxygen that links the phosphate to the nucleoside), with nitrogen (bridged phosphoroamidates), sulfur (bridged phosphorothioates) and carbon (bridged methylenephosphonates). The replacement can occur at either linking oxygen or at both of the linking oxygens.

[0257] The phosphate group can be replaced by non-phosphorus containing connectors in certain backbone modifications. In some embodiments, the charged phosphate group can be replaced by a neutral moiety. Examples of moieties which can replace the phosphate group can include, without limitation, e.g., methyl phosphonate, hydroxylamino, siloxane, carbonate, carboxymethyl, carbamate, amide, thioether, ethylene oxide linker, sulfonate, sulfonamide, thioformacetal, formacetal, oxime, methyleneimino, methylenemethylimino, methylenehydrazo, methylenedimethylhydrazo and methyleneoxymethylimino.

[0258] Scaffolds that can mimic nucleic acids can also be constructed wherein the phosphate linker and ribose sugar are replaced by nuclease resistant nucleoside or nucleotide surrogates. Such modifications may comprise backbone and sugar modifications. In some embodiments, the nucleobases can be tethered by a surrogate backbone. Examples can include, without limitation, the morpholino, cyclobutyl, pyrrolidine and peptide nucleic acid (PNA) nucleoside surrogates.

[0259] The modified nucleosides and modified nucleotides can include one or more modifications to the sugar group, i.e. at sugar modification. For example, the 2′ hydroxyl group (OH) can be modified, e.g. replaced with a number of different “oxy” or “deoxy” substituents. In some embodiments, modifications to the 2′ hydroxyl group can enhance the stability of the nucleic acid since the hydroxyl can no longer be deprotonated to form a 2′-alkoxide ion.

[0260] Examples of 2′ hydroxyl group modifications can include alkoxy or aryloxy (OR, wherein “R” can be, e.g., alkyl, cycloalkyl, aryl, aralkyl, heteroaryl or a sugar); polyethyleneglycols (PEG), O(CH₂CH₂O)˜CH₂CH₂OR wherein R can be, e.g., H or optionally substituted alkyl, and n can be an integer from 0 to 20 (e.g., from 0 to 4, from 0 to 8, from 0 to 10, from 0 to 16, from 1 to 4, from 1 to 8, from 1 to 10, from 1 to 16, from 1 to 20, from 2 to 4, from 2 to 8, from 2 to 10, from 2 to 16, from 2 to 20, from 4 to 8, from 4 to 10, from 4 to 16, and from 4 to 20). In some embodiments, the 2′ hydroxyl group modification can be 2-O-Me. In some embodiments, the 2′ hydroxyl group modification can be a 2′-fluoro modification, which replaces the 2′ hydroxyl group with a fluoride. In some embodiments, the 2′ hydroxyl group modification can include “locked” nucleic acids (LNA) in which the 2′ hydroxyl can be connected, e.g., by a C₁₋₆ alkylene or C₁₋₆ heteroalkylene bridge, to the 4′ carbon of the same ribose sugar, where exemplary bridges can include methylene, propylene, ether, or amino bridges; O-amino (wherein amino can be, e.g., NH₂; alkylamino, dialkylamino, heterocyclyl, arylamino, diarylamino, heteroarylamino, or diheteroarylamino, ethylenediamine, or polyamino) and aminoalkoxy, O(CH₂)˜-amino, (wherein amino can be, e.g., NH₂; alkylamino, dialkylamino, heterocyclyl, arylamino, diarylamino, heteroarylamino, or diheteroarylamino, ethylenediamine, or polyamino). In some embodiments, the 2′ hydroxyl group modification can include “unlocked” nucleic acids (UNA) in which the ribose ring lacks the C2′-C3′ bond. In some embodiments, the 2′ hydroxyl group modification can include the methoxyethyl group (MOE), (OCH₂CH₂OCH₃, e.g., a PEG derivative).

[0261] “Deoxy” 2′ modifications can include hydrogen (i.e. deoxyribose sugars, e.g., at the overhang portions of partially dsRNA); halo (e.g., bromo, chloro, fluoro, or iodo); amino (wherein amino can be, e.g., NH₂; alkylamino, dialkylamino, heterocyclyl, arylamino, diarylamino, heteroarylamino, diheteroarylamino, or amino acid); NH(CH₂CH₂NH)˜CH2CH₂— amino (wherein amino can be, e.g., as described herein), —NHC(O)R (wherein R can be, e.g., alkyl, cycloalkyl, aryl, aralkyl, heteroaryl or sugar), cyano; mercapto; alkyl-thio-alkyl; thioalkoxy; and alkyl, cycloalkyl, aryl, alkenyl and alkynyl, which may be optionally substituted with e.g., an amino as described herein.

[0262] The sugar modification can comprise a sugar group which may also contain one or more carbons that possess the opposite stereochemical configuration than that of the corresponding carbon in ribose. Thus, a modified nucleic acid can include nucleotides containing e.g., arabinose, as the sugar. The modified nucleic acids can also include abasic sugars. These abasic sugars can also be further modified at one or more of the constituent sugar atoms. The modified nucleic acids can also include one or more sugars that are in the L form, e.g. L-nucleosides.

[0263] The modified nucleosides and modified nucleotides described herein, which can be incorporated into a modified nucleic acid, can include a modified base, also called a nucleobase. Examples of nucleobases include, but are not limited to, adenine (A), guanine (G), cytosine (C), and uracil (U). These nucleobases can be modified or wholly replaced to provide modified residues that can be incorporated into modified nucleic acids. The nucleobase of the nucleotide can be independently selected from a purine, a pyrimidine, a purine analog, or pyrimidine analog. In some embodiments, the nucleobase can include, for example, naturally-occurring and synthetic derivatives of a base.

[0264] In embodiments employing a dual guide RNA, each of the crRNA and the tracr RNA can contain modifications. Such modifications may be at one or both ends of the crRNA and/or tracr RNA. In embodiments comprising sgRNA, one or more residues at one or both ends of the sgRNA may be chemically modified, and/or internal nucleosides may be modified, and/or the entire sgRNA may be chemically modified. Certain embodiments comprise a 5′ end modification. Certain embodiments comprise a 3′ end modification.

[0265] Modifications of 2′-O-methyl are encompassed.

[0266] Another chemical modification that has been shown to influence nucleotide sugar rings is halogen substitution. For example, 2′-fluoro (2′-F) substitution on nucleotide sugar rings can increase oligonucleotide binding affinity and nuclease stability. Modifications of 2′-fluoro (2′-F) are encompassed.

[0267] Phosphorothioate (PS) linkage or bond refers to a bond where a sulfur is substituted for one nonbridging phosphate oxygen in a phosphodiester linkage, for example in the bonds between nucleotides bases. When phosphorothioates are used to generate oligonucleotides, the modified oligonucleotides may also be referred to as S-oligos.

[0268] Abasic nucleotides refer to those which lack nitrogenous bases.

[0269] Inverted bases refer to those with linkages that are inverted from the normal 5′ to 3′ linkage (i.e., either a 5′ to 5′ linkage or a 3′ to 3′ linkage).

[0270] An abasic nucleotide can be attached with an inverted linkage. For example, an abasic nucleotide may be attached to the terminal 5′ nucleotide via a 5′ to 5′ linkage, or an abasic nucleotide may be attached to the terminal 3′ nucleotide via a 3′ to 3′ linkage. An inverted abasic nucleotide at either the terminal 5′ or 3′ nucleotide may also be called an inverted abasic end cap.

[0271] In some embodiments, one or more of the first three, four, or five nucleotides at the 5′ terminus, and one or more of the last three, four, or five nucleotides at the 3′ terminus are modified. In some embodiments, the modification is a 2′-O-Me, 2′-F, inverted abasic nucleotide, PS bond, or other nucleotide modification well known in the art to increase stability and/or performance.

[0272] In some embodiments, the first four nucleotides at the 5′ terminus, and the last four nucleotides at the 3′ terminus are linked with phosphorothioate (PS) bonds.

[0273] In some embodiments, the first three nucleotides at the 5′ terminus, and the last three nucleotides at the 3′ terminus comprise a 2′-O-methyl (2′-O-Me) modified nucleotide. In some embodiments, the first three nucleotides at the 5′ terminus, and the last three nucleotides at the 3′ terminus comprise a 2′-fluoro (2′-F) modified nucleotide.

### Ribonucleoprotein Complex

[0274] In some embodiments, a composition is encompassed comprising: a) one or more guide RNAs comprising one or more guide sequences from Table 2 and b) SaCas9 (when combined with a gRNA comprising any one of or combination of SEQ ID Nos: 11-15 or 27-69) or SluCas9 (when combined with a gRNA comprising any one of or combination of SEQ ID Nos: 243-269), or any of the mutant Cas9 proteins disclosed herein. In some embodiments, the guide RNA together with a Cas9 is called a ribonucleoprotein complex (RNP).

[0275] In some embodiments, the disclosure provides for an RNP complex, wherein the guide RNA (e.g., any of the guide RNAs disclosed herein) binds to or is capable of binding to a target sequence in the dystrophin gene.

[0276] In some embodiments, chimeric Cas9 (SaCas9 or SluCas9) nucleases are used, where one domain or region of the protein is replaced by a portion of a different protein. In some embodiments, a Cas9 nuclease domain may be replaced with a domain from a different nuclease such as Fok1. In some embodiments, a Cas9 nuclease may be a modified nuclease.

[0277] In some embodiments, the Cas9 is modified to contain only one functional nuclease domain. For example, the agent protein may be modified such that one of the nuclease domains is mutated or fully or partially deleted to reduce its nucleic acid cleavage activity.

[0278] In some embodiments, a conserved amino acid within a Cas9 protein nuclease domain is substituted to reduce or alter nuclease activity. In some embodiments, a Cas9 nuclease may comprise an amino acid substitution in the RuvC or RuvC-like nuclease domain. Exemplary amino acid substitutions in the RuvC or RuvC-like nuclease domain include D10A (based on the S. pyogenes Cas9 protein). See, e.g., Zetsche et al. (2015) Cell October 22:163(3): 759-771. In some embodiments, the Cas9 nuclease may comprise an amino acid substitution in the HNH or HNH-like nuclease domain. Exemplary amino acid substitutions in the HNH or HNH-like nuclease domain include E762A, H840A, N863A, H983A, and D986A (based on the S. pyogenes Cas9 protein). See, e.g., Zetsche et al. (2015). Further exemplary amino acid substitutions include D917A, E1006A, and D1255A (based on the Francisella novicida U112 Cpfl (FnCpfl) sequence (UniProtKB—AOQ7Q2 (CPF1_FRATN)). Further exemplary amino acid substitutions include D10A and N580A (based on the S. aureus Cas9 protein). See, e.g., Friedland et al., 2015, Genome Biol., 16:257.

[0279] In some embodiments, the Cas9 lacks cleavase activity. In some embodiments, the Cas9 comprises a dCas DNA-binding polypeptide. A dCas polypeptide has DNA-binding activity while essentially lacking catalytic (cleavase/nickase) activity. In some embodiments, the dCas polypeptide is a dCas9 polypeptide. In some embodiments, the Cas9 lacking cleavase activity or the dCas DNA-binding polypeptide is a version of a Cas nuclease (e.g., a Cas9 nuclease discussed above) in which its endonucleolytic active sites are inactivated, e.g., by one or more alterations (e.g., point mutations) in its catalytic domains. See, e.g., US 2014/0186958 A1; US 2015/0166980 A1.

[0280] In some embodiments, the Cas9 comprises one or more heterologous functional domains (e.g., is or comprises a fusion polypeptide).

[0281] In some embodiments, the heterologous functional domain may facilitate transport of the Cas9 into the nucleus of a cell. For example, the heterologous functional domain may be a nuclear localization signal (NLS). In some embodiments, the Cas9 may be fused with 1-10 NLS(s). In some embodiments, the Cas9 may be fused with 1-5 NLS(s). In some embodiments, the Cas9 may be fused with 1-3 NLS(s). In some embodiments, the Cas9 may be fused with one NLS. Where one NLS is used, the NLS may be attached at the N-terminus or the C-terminus of the Cas9 sequence, and may be directly fused/attached. In some embodiments, where more than one NLS is used, one or more NLS may be attached at the N-terminus and/or one or more NLS may be attached at the C-terminus. In some embodiments, one or more NLSs are directly attached to the Cas9. In some embodiments, one or more NLSs are attached to the Cas9 by means of a linker. In some embodiments, the linker is between 3-25 amino acids in length. In some embodiments, the linker is between 3-6 amino acids in length. In some embodiments, the linker comprises glycine and serine. In some embodiments, the linker comprises the sequence of GSVD (SEQ ID NO: 550) or GSGS (SEQ ID NO: 551). It may also be inserted within the Cas9 sequence. In other embodiments, the Cas9 may be fused with more than one NLS. In some embodiments, the Cas9 may be fused with 2, 3, 4, or 5 NLSs. In some embodiments, the Cas9 may be fused with two NLSs. In certain circumstances, the two NLSs may be the same (e.g., two SV40 NLSs) or different. In some embodiments, the Cas9 protein is fused with one or more SV40 NLSs. In some embodiments, the SV40 NLS comprises the amino acid sequence of SEQ ID NO: 713 (PKKKRKV). In some embodiments, the Cas9 protein (e.g., the SaCas9 or SluCas9 protein) is fused to one or more nucleoplasmin NLSs. In some embodiments, the Cas protein is fused to one or more c-myc NLSs. In some embodiments, the Cas protein is fused to one or more ElA NLSs. In some embodiments, the Cas protein is fused to one or more BP (bipartite) NLSs. In some embodiments, the nucleoplasmin NLS comprises the amino acid sequence of SEQ ID NO: 714 (KRPAATKKAGQAKKKK). In some embodiments, the Cas9 protein is fused with a c-Myc NLS. In some embodiments, the c-Myc NLS comprises the amino acid sequence of SEQ ID NO: 9 (PAAKKKKLD) and/or is encoded by the nucleic acid sequence of SEQ ID NO: 722 (CCGGCAGCTAAGAAAAAGAAACTGGAT). In some embodiments, the Cas9 is fused to two SV40 NLS sequences linked at the carboxy terminus. In some embodiments, the Cas9 may be fused with two NLSs, one linked at the N-terminus and one at the C-terminus. In some embodiments, the Cas9 may be fused with 3 NLSs. In some embodiments, the Cas9 may be fused with 3 NLSs, two linked at the N-terminus and one linked at the C-terminus. In some embodiments, the Cas9 may be fused with 3 NLSs, one linked at the N-terminus and two linked at the C-terminus. In some embodiments, the Cas9 may be fused with no NLS. In some embodiments, the Cas9 may be fused with one NLS. In some embodiments, the Cas9 may be fused with an NLS on the C-terminus and does not comprise an NLS fused on the N-terminus. In some embodiments, the Cas9 may be fused with an NLS on the N-terminus and does not comprise an NLS fused on the C-terminus. In some embodiments, the Cas9 protein is fused to an SV40 NLS and to a nucleoplasmin NLS. In some embodiments, the Cas9 protein is fused to an SV40 NLS and to a c-Myc NLS. In some embodiments, the SV40 NLS is fused to the C-terminus of the Cas9, while the nucleoplasmin NLS is fused to the N-terminus of the Cas9 protein. In some embodiments, the SV40 NLS is fused to the C-terminus of the Cas9, while the c-Myc NLS is fused to the N-terminus of the Cas9 protein. In some embodiments, the SV40 NLS is fused to the N-terminus of the Cas9, while the nucleoplasmin NLS is fused to the C-terminus of the Cas9 protein. In some embodiments, the SV40 NLS is fused to the N-terminus of the Cas9, while the c-Myc NLS is fused to the C-terminus of the Cas9 protein. In some embodiments, the SV40 NLS is fused to the Cas9 protein by means of a linker. In some embodiments, the SV40 NLS and linker is encoded by the nucleic acid sequence of SEQ ID NO: 723 (ATGATGGCCCCAAAGAAGAAGCGGAAGGTCGGTATCCACGGAGTCCCAGCAGCC). In some embodiments, the nucleoplasmin NLS is fused to the Cas9 protein by means of a linker. In some embodiments, the c-Myc NLS is fused to the Cas9 protein by means of a linker. In some embodiments, an additional domain may be: a) fused to the N- or C-terminus of the Cas protein (e.g., a Cas9 protein), b) fused to the N-terminus of an NLS fused to the N-terminus of a Cas protein, or c) fused to the C-terminus of an NLS fused to the C-terminus of a Cas protein. In some embodiments, an NLS is fused to the N- and/or C-terminus of the Cas protein by means of a linker. In some embodiments, an NLS is fused to the N-terminus of an N-terminally-fused NLS on a Cas protein by means of a linker, and/or an NLS is fused to the C-terminus of a C-terminally fused NLS on a Cas protein by means of a linker. In some embodiments, the linker is GSVD (SEQ ID NO: 550) or GSGS (SEQ ID NO: 551). In some embodiments, the Cas protein comprises a c-Myc NLS fused to the N-terminus of the Cas protein (or to an N-terminally-fused NLS on the Cas protein), optionally by means of a linker. In some embodiments, the Cas protein comprises an SV40 NLS fused to the C-terminus of the Cas protein (or to a C-terminally-fused NLS on the Cas protein), optionally by means of a linker. In some embodiments, the Cas protein comprises a nucleoplasmin NLS fused to the C-terminus of the Cas protein (or to a C-terminally-fused NLS on the Cas protein), optionally by means of a linker. In some embodiments, the Cas protein comprises: a) a c-Myc NLS fused to the N-terminus of the Cas protein, optionally by means of a linker, b) an SV40 NLS fused to the C-terminus of the Cas protein, optionally by means of a linker, and c) a nucleoplasmin NLS fused to the C-terminus of the SV40 NLS, optionally by means of a linker. In some embodiments, the Cas protein comprises: a) a c-Myc NLS fused to the N-terminus of the Cas protein, optionally by means of a linker, b) a nucleoplasmin NLS fused to the C-terminus of the Cas protein, optionally by means of a linker, and c) an SV40 NLS fused to the C-terminus of the nucleoplasmin NLS, optionally by means of a linker. In some embodiments, a c-myc NLS is fused to the N-terminus of the Cas9 and an SV40 NLS and/or nucleoplasmin NLS is fused to the C-terminus of the Cas9. In some embodiments, a c-myc NLS is fused to the N-terminus of the Cas9 (e.g., by means of a linker such as GSVD), an SV40 NLS is fused to the C-terminus of the Cas9 (e.g., by means of a linker such as GSGS), and a nucleoplasmin NLS is fused to the C-terminus of the SV-40 NLS (e.g., by means of a linker such as GSGS).

[0282] In some embodiments, the heterologous functional domain may be capable of modifying the intracellular half-life of the Cas9. In some embodiments, the half-life of the Cas9 may be increased. In some embodiments, the half-life of the Cas9 may be reduced. In some embodiments, the heterologous functional domain may be capable of increasing the stability of the Cas9. In some embodiments, the heterologous functional domain may be capable of reducing the stability of the Cas9. In some embodiments, the heterologous functional domain may act as a signal peptide for protein degradation. In some embodiments, the protein degradation may be mediated by proteolytic enzymes, such as, for example, proteasomes, lysosomal proteases, or calpain proteases. In some embodiments, the heterologous functional domain may comprise a PEST sequence. In some embodiments, the Cas9 may be modified by addition of ubiquitin or a polyubiquitin chain. In some embodiments, the ubiquitin may be a ubiquitin-like protein (UBL). Non-limiting examples of ubiquitin-like proteins include small ubiquitin-like modifier (SUMO), ubiquitin cross-reactive protein (UCRP, also known as interferon-stimulated gene-15 (ISG15)), ubiquitin-related modifier-1 (URM1), neuronal-precursor-cell-expressed developmentally downregulated protein-8 (NEDD8, also called Rub1 in S. cerevisiae), human leukocyte antigen F-associated (FAT10), autophagy-8 (ATG8) and −12 (ATG12), Fau ubiquitin-like protein (FUB1), membrane-anchored UBL (MUB), ubiquitin fold-modifier-1 (UFM1), and ubiquitin-like protein-5 (UBL5).

[0283] In some embodiments, the heterologous functional domain may be a marker domain. Non-limiting examples of marker domains include fluorescent proteins, purification tags, epitope tags, and reporter gene sequences. In some embodiments, the marker domain may be a fluorescent protein. Non-limiting examples of suitable fluorescent proteins include green fluorescent proteins (e.g., GFP, GFP-2, tagGFP, turboGFP, sfGFP, EGFP, Emerald, Azami Green, Monomeric Azami Green, CopGFP, AceGFP, ZsGreen1), yellow fluorescent proteins (e.g., YFP, EYFP, Citrine, Venus, YPet, PhiYFP, ZsYellow1), blue fluorescent proteins (e.g., EBFP, EBFP2, Azurite, mKalamal, GFPuv, Sapphire, T-sapphire), cyan fluorescent proteins (e.g., ECFP, Cerulean, CyPet, AmCyanl, Midoriishi-Cyan), red fluorescent proteins (e.g., mKate, mKate2, mPlum, DsRed monomer, mCherry, mRFP1, DsRed-Express, DsRed2, DsRed-Monomer, HcRed-Tandem, HcRedl, AsRed2, eqFP611, mRasberry, mStrawberry, Jred), and orange fluorescent proteins (mOrange, mKO, Kusabira-Orange, Monomeric Kusabira-Orange, mTangerine, tdTomato) or any other suitable fluorescent protein. In other embodiments, the marker domain may be a purification tag and/or an epitope tag. Non-limiting exemplary tags include glutathione-S-transferase (GST), chitin binding protein (CBP), maltose binding protein (MBP), thioredoxin (TRX), poly(NANP), tandem affinity purification (TAP) tag, myc, AcV5, AU1, AU5, E, ECS, E2, FLAG, HA, nus, Softag 1, Softag 3, Strep, SBP, Glu-Glu, HSV, KT3, S, S1, T7, V5, VSV-G, 6xHis, 8xHis, biotin carboxyl carrier protein (BCCP), poly-His, and calmodulin. Non-limiting exemplary reporter genes include glutathione-S-transferase (GST), horseradish peroxidase (HRP), chloramphenicol acetyltransferase (CAT), beta-galactosidase, beta-glucuronidase, luciferase, or fluorescent proteins.

[0284] In additional embodiments, the heterologous functional domain may target the Cas9 to a specific organelle, cell type, tissue, or organ. In some embodiments, the heterologous functional domain may target the Cas9 to muscle.

[0285] In further embodiments, the heterologous functional domain may be an effector domain. When the Cas9 is directed to its target sequence, e.g., when a Cas9 is directed to a target sequence by a guide RNA, the effector domain may modify or affect the target sequence. In some embodiments, the effector domain may be chosen from a nucleic acid binding domain or a nuclease domain (e.g., a non-Cas nuclease domain). In some embodiments, the heterologous functional domain is a nuclease, such as a FokI nuclease. See, e.g., U.S. Pat. No. 9,023,649.

[0286] In some embodiments, any of the compositions disclosed herein comprising any of the guides and/or endonucleases disclosed herein is sterile and/or substantially pyrogen-free. In particular embodiments, any of the compositions disclosed herein comprise a pharmaceutically acceptable carrier. The phrase “pharmaceutically or pharmacologically acceptable” refers to molecular entities and compositions that do not produce an adverse, allergic, or other untoward reaction when administered to an animal or human. As used herein “pharmaceutically acceptable carrier” includes any and all solvents (e.g., water), dispersion media, coatings, antibacterial and antifungal agents, isotonic and absorption delaying agents, and the like that are physiologically compatible, including pharmaceutically acceptable cell culture media. Pharmaceutically acceptable carriers include sterile aqueous solutions or dispersions and sterile powders for the extemporaneous preparation of sterile injectable solutions or dispersion. In some embodiments, the composition comprises a preservative to prevent the growth of microorganisms.

### Determination of Efficacy of Guide RNAs

[0287] In some embodiments, the efficacy of a guide RNA is determined when delivered or expressed together with other components forming an RNP. In some embodiments, the guide RNA is expressed together with a SaCas9 or SluCas9. In some embodiments, the guide RNA is delivered to or expressed in a cell line that already stably expresses an SaCas9 or SluCas9. In some embodiments the guide RNA is delivered to a cell as part of an RNP. In some embodiments, the guide RNA is delivered to a cell along with a nucleic acid (e.g., mRNA) encoding SaCas9 or SluCas9.

[0288] In some embodiments, the efficacy of particular guide RNAs is determined based on in vitro models. In some embodiments, the in vitro model is a cell line.

[0289] In some embodiments, the efficacy of particular guide RNAs is determined across multiple in vitro cell models for a guide RNA selection process. In some embodiments, a cell line comparison of data with selected guide RNAs is performed. In some embodiments, cross screening in multiple cell models is performed.

[0290] In some embodiments, the efficacy of particular guide RNAs is determined based on in vivo models. In some embodiments, the in vivo model is a rodent model. In some embodiments, the rodent model is a mouse which expresses a mutated dystrophin gene. In some embodiments, the in vivo model is a non-human primate, for example cynomolgus monkey.

### III. Methods of Gene Editing and Treating DMD

[0291] This disclosure provides methods for gene editing and treating Duchenne Muscular Dystrophy (DMD). In some embodiments, any of the compositions described herein may be administered to a subject in need thereof for use in making a double or single strand break, or excising a portion (e.g., less than about 250 nucleotides) in exon 51 of the dystrophin (DMD) gene, and to treat DMD. In some embodiments, pairs of guide RNAs described herein, in any of the vector configurations described herein, may be administered to a subject in need thereof to make a single or double-strand break, excise a portion of a DMD, and treat DMD. In some embodiments, any of the compositions described herein may be administered to a subject in need thereof for use in treating DMD. In some embodiments, a nucleic acid molecule comprising a first nucleic acid encoding one or more guide RNAs of Table 2 and a second nucleic acid encoding either SaCas9 or SluCas9 (depending on the guide) is administered to a subject to treat DMD. In some embodiments, a single nucleic acid molecule (which may be a vector, including an AAV vector) comprising a first nucleic acid encoding one or more guide RNAs of Table 2 and a second nucleic acid encoding either SaCas9 or SluCas9 (depending on the guide) is administered to a subject to treat DMD. In some embodiments, more than one nucleic acid molecules (which may be a vectors, including an AAV vectors) are administered to a subject to treat DMD, wherein a first nucleic acid encoding one or more guide RNAs of Table 2 and a second nucleic acid encoding either SaCas9 or SluCas9 (depending on the guide) are together on one nucleic acid molecule or separated on different nucleic acid molecules.

[0292] In some embodiments, any of the compositions described herein is administered to a subject in need thereof to treat Duchenne Muscular Dystrophy (DMD).

[0293] In some embodiments, any of the compositions described herein is administered to a subject in need thereof to induce a single or double strand break in exon 51 of the dystrophin gene.

[0294] In some embodiments, any of the compositions described herein is administered to a subject in need thereof to delete (e.g., excise) a portion of exon 51 of the dystrophin gene.

[0295] In some embodiments, a method of treating Duchenne Muscular Dystrophy (DMD) is provided, the method comprising delivering to a cell any one of the compositions described herein, wherein the cell comprises a mutation in the dystrophin gene that is known to be associated with DMD.

[0296] In some embodiments, methods are provided for treating Duchenne Muscular Dystrophy (DMD), the method comprising delivering to a cell at least one nucleic acid molecule comprising a pair of guide RNAs comprising a first and second spacer sequence, wherein the pair of first and spacer sequences is selected from any one of the following pairs: SEQ ID NO: 11 and SEQ ID NO: 12; SEQ ID NO: 11 and SEQ ID NO: 13; SEQ ID NO: 11 and SEQ ID NO: 14; SEQ ID NO: 11 and SEQ ID NO: 15; SEQ ID NO: 12 and SEQ ID NO: 13; SEQ ID NO: 12 and SEQ ID NO: 14; SEQ ID NO: 12 and SEQ ID NO: 15; SEQ ID NO: 13 and SEQ ID NO: 14; SEQ ID NO: 13 and SEQ ID NO: 15; SEQ ID NO: 14 and SEQ ID NO: 15; SEQ ID NO: 27 and SEQ ID NO: 28; SEQ ID NO: 27 and SEQ ID NO: 29; SEQ ID NO: 27 and SEQ ID NO: 30; SEQ ID NO: 27 and SEQ ID NO: 31; SEQ ID NO: 27 and SEQ ID NO: 32; SEQ ID NO: 27 and SEQ ID NO: 33; SEQ ID NO: 27 and SEQ ID NO: 34; SEQ ID NO: 27 and SEQ ID NO: 35; SEQ ID NO: 27 and SEQ ID NO: 36; SEQ ID NO: 27 and SEQ ID NO: 37; SEQ ID NO: 27 and SEQ ID NO: 38; SEQ ID NO: 27 and SEQ ID NO: 39; SEQ ID NO: 27 and SEQ ID NO: 40; SEQ ID NO: 27 and SEQ ID NO: 41; SEQ ID NO: 27 and SEQ ID NO: 42; SEQ ID NO: 27 and SEQ ID NO: 43; SEQ ID NO: 27 and SEQ ID NO: 44; SEQ ID NO: 27 and SEQ ID NO: 45; SEQ ID NO: 27 and SEQ ID NO: 46; SEQ ID NO: 27 and SEQ ID NO: 47; SEQ ID NO: 27 and SEQ ID NO: 48; SEQ ID NO: 27 and SEQ ID NO: 53; SEQ ID NO: 27 and SEQ ID NO: 54; SEQ ID NO: 27 and SEQ ID NO: 55; SEQ ID NO: 27 and SEQ ID NO: 56; SEQ ID NO: 27 and SEQ ID NO: 57; SEQ ID NO: 27 and SEQ ID NO: 58; SEQ ID NO: 27 and SEQ ID NO: 59; SEQ ID NO: 27 and SEQ ID NO: 60; SEQ ID NO: 27 and SEQ ID NO: 61; SEQ ID NO: 27 and SEQ ID NO: 62; SEQ ID NO: 27 and SEQ ID NO: 63; SEQ ID NO: 27 and SEQ ID NO: 64; SEQ ID NO: 27 and SEQ ID NO: 65; SEQ ID NO: 27 and SEQ ID NO: 66; SEQ ID NO: 27 and SEQ ID NO: 67; SEQ ID NO: 27 and SEQ ID NO: 68; SEQ ID NO: 27 and SEQ ID NO: 69; SEQ ID NO: 28 and SEQ ID NO: 29; SEQ ID NO: 28 and SEQ ID NO: 30; SEQ ID NO: 28 and SEQ ID NO: 31; SEQ ID NO: 28 and SEQ ID NO: 32; SEQ ID NO: 28 and SEQ ID NO: 33; SEQ ID NO: 28 and SEQ ID NO: 34; SEQ ID NO: 28 and SEQ ID NO: 35; SEQ ID NO: 28 and SEQ ID NO: 36; SEQ ID NO: 28 and SEQ ID NO: 37; SEQ ID NO: 28 and SEQ ID NO: 38; SEQ ID NO: 28 and SEQ ID NO: 39; SEQ ID NO: 28 and SEQ ID NO: 40; SEQ ID NO: 28 and SEQ ID NO: 41; SEQ ID NO: 28 and SEQ ID NO: 42; SEQ ID NO: 28 and SEQ ID NO: 43; SEQ ID NO: 28 and SEQ ID NO: 44; SEQ ID NO: 28 and SEQ ID NO: 45; SEQ ID NO: 28 and SEQ ID NO: 46; SEQ ID NO: 28 and SEQ ID NO: 47; SEQ ID NO: 28 and SEQ ID NO: 48; SEQ ID NO: 28 and SEQ ID NO: 53; SEQ ID NO: 28 and SEQ ID NO: 54; SEQ ID NO: 28 and SEQ ID NO: 55; SEQ ID NO: 28 and SEQ ID NO: 56; SEQ ID NO: 28 and SEQ ID NO: 57; SEQ ID NO: 28 and SEQ ID NO: 58; SEQ ID NO: 28 and SEQ ID NO: 59; SEQ ID NO: 28 and SEQ ID NO: 60; SEQ ID NO: 28 and SEQ ID NO: 61; SEQ ID NO: 28 and SEQ ID NO: 62; SEQ ID NO: 28 and SEQ ID NO: 63; SEQ ID NO: 28 and SEQ ID NO: 64; SEQ ID NO: 28 and SEQ ID NO: 65; SEQ ID NO: 28 and SEQ ID NO: 66; SEQ ID NO: 28 and SEQ ID NO: 67; SEQ ID NO: 28 and SEQ ID NO: 68; SEQ ID NO: 28 and SEQ ID NO: 69; SEQ ID NO: 29 and SEQ ID NO: 30; SEQ ID NO: 29 and SEQ ID NO: 31; SEQ ID NO: 29 and SEQ ID NO: 32; SEQ ID NO: 29 and SEQ ID NO: 33; SEQ ID NO: 29 and SEQ ID NO: 34; SEQ ID NO: 29 and SEQ ID NO: 35; SEQ ID NO: 29 and SEQ ID NO: 36; SEQ ID NO: 29 and SEQ ID NO: 37; SEQ ID NO: 29 and SEQ ID NO: 38; SEQ ID NO: 29 and SEQ ID NO: 39; SEQ ID NO: 29 and SEQ ID NO: 40; SEQ ID NO: 29 and SEQ ID NO: 41; SEQ ID NO: 29 and SEQ ID NO: 42; SEQ ID NO: 29 and SEQ ID NO: 43; SEQ ID NO: 29 and SEQ ID NO: 44; SEQ ID NO: 29 and SEQ ID NO: 45; SEQ ID NO: 29 and SEQ ID NO: 46; SEQ ID NO: 29 and SEQ ID NO: 47; SEQ ID NO: 29 and SEQ ID NO: 48; SEQ ID NO: 29 and SEQ ID NO: 53; SEQ ID NO: 29 and SEQ ID NO: 54; SEQ ID NO: 29 and SEQ ID NO: 55; SEQ ID NO: 29 and SEQ ID NO: 56; SEQ ID NO: 29 and SEQ ID NO: 57; SEQ ID NO: 29 and SEQ ID NO: 58; SEQ ID NO: 29 and SEQ ID NO: 59; SEQ ID NO: 29 and SEQ ID NO: 60; SEQ ID NO: 29 and SEQ ID NO: 61; SEQ ID NO: 29 and SEQ ID NO: 62; SEQ ID NO: 29 and SEQ ID NO: 63; SEQ ID NO: 29 and SEQ ID NO: 64; SEQ ID NO: 29 and SEQ ID NO: 65; SEQ ID NO: 29 and SEQ ID NO: 66; SEQ ID NO: 29 and SEQ ID NO: 67; SEQ ID NO: 29 and SEQ ID NO: 68; SEQ ID NO: 29 and SEQ ID NO: 69; SEQ ID NO: 30 and SEQ ID NO: 31; SEQ ID NO: 30 and SEQ ID NO: 32; SEQ ID NO: 30 and SEQ ID NO: 33; SEQ ID NO: 30 and SEQ ID NO: 34; SEQ ID NO: 30 and SEQ ID NO: 35; SEQ ID NO: 30 and SEQ ID NO: 36; SEQ ID NO: 30 and SEQ ID NO: 37; SEQ ID NO: 30 and SEQ ID NO: 38; SEQ ID NO: 30 and SEQ ID NO: 39; SEQ ID NO: 30 and SEQ ID NO: 40; SEQ ID NO: 30 and SEQ ID NO: 41; SEQ ID NO: 30 and SEQ ID NO: 42; SEQ ID NO: 30 and SEQ ID NO: 43; SEQ ID NO: 30 and SEQ ID NO: 44; SEQ ID NO: 30 and SEQ ID NO: 45; SEQ ID NO: 30 and SEQ ID NO: 46; SEQ ID NO: 30 and SEQ ID NO: 47; SEQ ID NO: 30 and SEQ ID NO: 48; SEQ ID NO: 30 and SEQ ID NO: 53; SEQ ID NO: 30 and SEQ ID NO: 54; SEQ ID NO: 30 and SEQ ID NO: 55; SEQ ID NO: 30 and SEQ ID NO: 56; SEQ ID NO: 30 and SEQ ID NO: 57; SEQ ID NO: 30 and SEQ ID NO: 58; SEQ ID NO: 30 and SEQ ID NO: 59; SEQ ID NO: 30 and SEQ ID NO: 60; SEQ ID NO: 30 and SEQ ID NO: 61; SEQ ID NO: 30 and SEQ ID NO: 62; SEQ ID NO: 30 and SEQ ID NO: 63; SEQ ID NO: 30 and SEQ ID NO: 64; SEQ ID NO: 30 and SEQ ID NO: 65; SEQ ID NO: 30 and SEQ ID NO: 66; SEQ ID NO: 30 and SEQ ID NO: 67; SEQ ID NO: 30 and SEQ ID NO: 68; SEQ ID NO: 30 and SEQ ID NO: 69; SEQ ID NO: 31 and SEQ ID NO: 32; SEQ ID NO: 31 and SEQ ID NO: 33; SEQ ID NO: 31 and SEQ ID NO: 34; SEQ ID NO: 31 and SEQ ID NO: 35; SEQ ID NO: 31 and SEQ ID NO: 36; SEQ ID NO: 31 and SEQ ID NO: 37; SEQ ID NO: 31 and SEQ ID NO: 38; SEQ ID NO: 31 and SEQ ID NO: 39; SEQ ID NO: 31 and SEQ ID NO: 40; SEQ ID NO: 31 and SEQ ID NO: 41; SEQ ID NO: 31 and SEQ ID NO: 42; SEQ ID NO: 31 and SEQ ID NO: 43; SEQ ID NO: 31 and SEQ ID NO: 44; SEQ ID NO: 31 and SEQ ID NO: 45; SEQ ID NO: 31 and SEQ ID NO: 46; SEQ ID NO: 31 and SEQ ID NO: 47; SEQ ID NO: 31 and SEQ ID NO: 48; SEQ ID NO: 31 and SEQ ID NO: 53; SEQ ID NO: 31 and SEQ ID NO: 54; SEQ ID NO: 31 and SEQ ID NO: 55; SEQ ID NO: 31 and SEQ ID NO: 56; SEQ ID NO: 31 and SEQ ID NO: 57; SEQ ID NO: 31 and SEQ ID NO: 58; SEQ ID NO: 31 and SEQ ID NO: 59; SEQ ID NO: 31 and SEQ ID NO: 60; SEQ ID NO: 31 and SEQ ID NO: 61; SEQ ID NO: 31 and SEQ ID NO: 62; SEQ ID NO: 31 and SEQ ID NO: 63; SEQ ID NO: 31 and SEQ ID NO: 64; SEQ ID NO: 31 and SEQ ID NO: 65; SEQ ID NO: 31 and SEQ ID NO: 66; SEQ ID NO: 31 and SEQ ID NO: 67; SEQ ID NO: 31 and SEQ ID NO: 68; SEQ ID NO: 31 and SEQ ID NO: 69; SEQ ID NO: 32 and SEQ ID NO: 33; SEQ ID NO: 32 and SEQ ID NO: 34; SEQ ID NO: 32 and SEQ ID NO: 35; SEQ ID NO: 32 and SEQ ID NO: 36; SEQ ID NO: 32 and SEQ ID NO: 37; SEQ ID NO: 32 and SEQ ID NO: 38; SEQ ID NO: 32 and SEQ ID NO: 39; SEQ ID NO: 32 and SEQ ID NO: 40; SEQ ID NO: 32 and SEQ ID NO: 41; SEQ ID NO: 32 and SEQ ID NO: 42; SEQ ID NO: 32 and SEQ ID NO: 43; SEQ ID NO: 32 and SEQ ID NO: 44; SEQ ID NO: 32 and SEQ ID NO: 45; SEQ ID NO: 32 and SEQ ID NO: 46; SEQ ID NO: 32 and SEQ ID NO: 47; SEQ ID NO: 32 and SEQ ID NO: 48; SEQ ID NO: 32 and SEQ ID NO: 53; SEQ ID NO: 32 and SEQ ID NO: 54; SEQ ID NO: 32 and SEQ ID NO: 55; SEQ ID NO: 32 and SEQ ID NO: 56; SEQ ID NO: 32 and SEQ ID NO: 57; SEQ ID NO: 32 and SEQ ID NO: 58; SEQ ID NO: 32 and SEQ ID NO: 59; SEQ ID NO: 32 and SEQ ID NO: 60; SEQ ID NO: 32 and SEQ ID NO: 61; SEQ ID NO: 32 and SEQ ID NO: 62; SEQ ID NO: 32 and SEQ ID NO: 63; SEQ ID NO: 32 and SEQ ID NO: 64; SEQ ID NO: 32 and SEQ ID NO: 65; SEQ ID NO: 32 and SEQ ID NO: 66; SEQ ID NO: 32 and SEQ ID NO: 67; SEQ ID NO: 32 and SEQ ID NO: 68; SEQ ID NO: 32 and SEQ ID NO: 69; SEQ ID NO: 33 and SEQ ID NO: 34; SEQ ID NO: 33 and SEQ ID NO: 35; SEQ ID NO: 33 and SEQ ID NO: 36; SEQ ID NO: 33 and SEQ ID NO: 37; SEQ ID NO: 33 and SEQ ID NO: 38; SEQ ID NO: 33 and SEQ ID NO: 39; SEQ ID NO: 33 and SEQ ID NO: 40; SEQ ID NO: 33 and SEQ ID NO: 41; SEQ ID NO: 33 and SEQ ID NO: 42; SEQ ID NO: 33 and SEQ ID NO: 43; SEQ ID NO: 33 and SEQ ID NO: 44; SEQ ID NO: 33 and SEQ ID NO: 45; SEQ ID NO: 33 and SEQ ID NO: 46; SEQ ID NO: 33 and SEQ ID NO: 47; SEQ ID NO: 33 and SEQ ID NO: 48; SEQ ID NO: 33 and SEQ ID NO: 53; SEQ ID NO: 33 and SEQ ID NO: 54; SEQ ID NO: 33 and SEQ ID NO: 55; SEQ ID NO: 33 and SEQ ID NO: 56; SEQ ID NO: 33 and SEQ ID NO: 57; SEQ ID NO: 33 and SEQ ID NO: 58; SEQ ID NO: 33 and SEQ ID NO: 59; SEQ ID NO: 33 and SEQ ID NO: 60; SEQ ID NO: 33 and SEQ ID NO: 61; SEQ ID NO: 33 and SEQ ID NO: 62; SEQ ID NO: 33 and SEQ ID NO: 63; SEQ ID NO: 33 and SEQ ID NO: 64; SEQ ID NO: 33 and SEQ ID NO: 65; SEQ ID NO: 33 and SEQ ID NO: 66; SEQ ID NO: 33 and SEQ ID NO: 67; SEQ ID NO: 33 and SEQ ID NO: 68; SEQ ID NO: 33 and SEQ ID NO: 69; SEQ ID NO: 34 and SEQ ID NO: 35; SEQ ID NO: 34 and SEQ ID NO: 36; SEQ ID NO: 34 and SEQ ID NO: 37; SEQ ID NO: 34 and SEQ ID NO: 38; SEQ ID NO: 34 and SEQ ID NO: 39; SEQ ID NO: 34 and SEQ ID NO: 40; SEQ ID NO: 34 and SEQ ID NO: 41; SEQ ID NO: 34 and SEQ ID NO: 42; SEQ ID NO: 34 and SEQ ID NO: 43; SEQ ID NO: 34 and SEQ ID NO: 44; SEQ ID NO: 34 and SEQ ID NO: 45; SEQ ID NO: 34 and SEQ ID NO: 46; SEQ ID NO: 34 and SEQ ID NO: 47; SEQ ID NO: 34 and SEQ ID NO: 48; SEQ ID NO: 34 and SEQ ID NO: 53; SEQ ID NO: 34 and SEQ ID NO: 54; SEQ ID NO: 34 and SEQ ID NO: 55; SEQ ID NO: 34 and SEQ ID NO: 56; SEQ ID NO: 34 and SEQ ID NO: 57; SEQ ID NO: 34 and SEQ ID NO: 58; SEQ ID NO: 34 and SEQ ID NO: 59; SEQ ID NO: 34 and SEQ ID NO: 60; SEQ ID NO: 34 and SEQ ID NO: 61; SEQ ID NO: 34 and SEQ ID NO: 62; SEQ ID NO: 34 and SEQ ID NO: 63; SEQ ID NO: 34 and SEQ ID NO: 64; SEQ ID NO: 34 and SEQ ID NO: 65; SEQ ID NO: 34 and SEQ ID NO: 66; SEQ ID NO: 34 and SEQ ID NO: 67; SEQ ID NO: 34 and SEQ ID NO: 68; SEQ ID NO: 34 and SEQ ID NO: 69; SEQ ID NO: 35 and SEQ ID NO: 36; SEQ ID NO: 35 and SEQ ID NO: 37; SEQ ID NO: 35 and SEQ ID NO: 38; SEQ ID NO: 35 and SEQ ID NO: 39; SEQ ID NO: 35 and SEQ ID NO: 40; SEQ ID NO: 35 and SEQ ID NO: 41; SEQ ID NO: 35 and SEQ ID NO: 42; SEQ ID NO: 35 and SEQ ID NO: 43; SEQ ID NO: 35 and SEQ ID NO: 44; SEQ ID NO: 35 and SEQ ID NO: 45; SEQ ID NO: 35 and SEQ ID NO: 46; SEQ ID NO: 35 and SEQ ID NO: 47; SEQ ID NO: 35 and SEQ ID NO: 48; SEQ ID NO: 35 and SEQ ID NO: 53; SEQ ID NO: 35 and SEQ ID NO: 54; SEQ ID NO: 35 and SEQ ID NO: 55; SEQ ID NO: 35 and SEQ ID NO: 56; SEQ ID NO: 35 and SEQ ID NO: 57; SEQ ID NO: 35 and SEQ ID NO: 58; SEQ ID NO: 35 and SEQ ID NO: 59; SEQ ID NO: 35 and SEQ ID NO: 60; SEQ ID NO: 35 and SEQ ID NO: 61; SEQ ID NO: 35 and SEQ ID NO: 62; SEQ ID NO: 35 and SEQ ID NO: 63; SEQ ID NO: 35 and SEQ ID NO: 64; SEQ ID NO: 35 and SEQ ID NO: 65; SEQ ID NO: 35 and SEQ ID NO: 66; SEQ ID NO: 35 and SEQ ID NO: 67; SEQ ID NO: 35 and SEQ ID NO: 68; SEQ ID NO: 35 and SEQ ID NO: 69; SEQ ID NO: 36 and SEQ ID NO: 37; SEQ ID NO: 36 and SEQ ID NO: 38; SEQ ID NO: 36 and SEQ ID NO: 39; SEQ ID NO: 36 and SEQ ID NO: 40; SEQ ID NO: 36 and SEQ ID NO: 41; SEQ ID NO: 36 and SEQ ID NO: 42; SEQ ID NO: 36 and SEQ ID NO: 43; SEQ ID NO: 36 and SEQ ID NO: 44; SEQ ID NO: 36 and SEQ ID NO: 45; SEQ ID NO: 36 and SEQ ID NO: 46; SEQ ID NO: 36 and SEQ ID NO: 47; SEQ ID NO: 36 and SEQ ID NO: 48; SEQ ID NO: 36 and SEQ ID NO: 53; SEQ ID NO: 36 and SEQ ID NO: 54; SEQ ID NO: 36 and SEQ ID NO: 55; SEQ ID NO: 36 and SEQ ID NO: 56; SEQ ID NO: 36 and SEQ ID NO: 57; SEQ ID NO: 36 and SEQ ID NO: 58; SEQ ID NO: 36 and SEQ ID NO: 59; SEQ ID NO: 36 and SEQ ID NO: 60; SEQ ID NO: 36 and SEQ ID NO: 61; SEQ ID NO: 36 and SEQ ID NO: 62; SEQ ID NO: 36 and SEQ ID NO: 63; SEQ ID NO: 36 and SEQ ID NO: 64; SEQ ID NO: 36 and SEQ ID NO: 65; SEQ ID NO: 36 and SEQ ID NO: 66; SEQ ID NO: 36 and SEQ ID NO: 67; SEQ ID NO: 36 and SEQ ID NO: 68; SEQ ID NO: 36 and SEQ ID NO: 69; SEQ ID NO: 37 and SEQ ID NO: 38; SEQ ID NO: 37 and SEQ ID NO: 39; SEQ ID NO: 37 and SEQ ID NO: 40; SEQ ID NO: 37 and SEQ ID NO: 41; SEQ ID NO: 37 and SEQ ID NO: 42; SEQ ID NO: 37 and SEQ ID NO: 43; SEQ ID NO: 37 and SEQ ID NO: 44; SEQ ID NO: 37 and SEQ ID NO: 45; SEQ ID NO: 37 and SEQ ID NO: 46; SEQ ID NO: 37 and SEQ ID NO: 47; SEQ ID NO: 37 and SEQ ID NO: 48; SEQ ID NO: 37 and SEQ ID NO: 53; SEQ ID NO: 37 and SEQ ID NO: 54; SEQ ID NO: 37 and SEQ ID NO: 55; SEQ ID NO: 37 and SEQ ID NO: 56; SEQ ID NO: 37 and SEQ ID NO: 57; SEQ ID NO: 37 and SEQ ID NO: 58; SEQ ID NO: 37 and SEQ ID NO: 59; SEQ ID NO: 37 and SEQ ID NO: 60; SEQ ID NO: 37 and SEQ ID NO: 61; SEQ ID NO: 37 and SEQ ID NO: 62; SEQ ID NO: 37 and SEQ ID NO: 63; SEQ ID NO: 37 and SEQ ID NO: 64; SEQ ID NO: 37 and SEQ ID NO: 65; SEQ ID NO: 37 and SEQ ID NO: 66; SEQ ID NO: 37 and SEQ ID NO: 67; SEQ ID NO: 37 and SEQ ID NO: 68; SEQ ID NO: 37 and SEQ ID NO: 69; SEQ ID NO: 38 and SEQ ID NO: 39; SEQ ID NO: 38 and SEQ ID NO: 40; SEQ ID NO: 38 and SEQ ID NO: 41; SEQ ID NO: 38 and SEQ ID NO: 42; SEQ ID NO: 38 and SEQ ID NO: 43; SEQ ID NO: 38 and SEQ ID NO: 44; SEQ ID NO: 38 and SEQ ID NO: 45; SEQ ID NO: 38 and SEQ ID NO: 46; SEQ ID NO: 38 and SEQ ID NO: 47; SEQ ID NO: 38 and SEQ ID NO: 48; SEQ ID NO: 38 and SEQ ID NO: 53; SEQ ID NO: 38 and SEQ ID NO: 54; SEQ ID NO: 38 and SEQ ID NO: 55; SEQ ID NO: 38 and SEQ ID NO: 56; SEQ ID NO: 38 and SEQ ID NO: 57; SEQ ID NO: 38 and SEQ ID NO: 58; SEQ ID NO: 38 and SEQ ID NO: 59; SEQ ID NO: 38 and SEQ ID NO: 60; SEQ ID NO: 38 and SEQ ID NO: 61; SEQ ID NO: 38 and SEQ ID NO: 62; SEQ ID NO: 38 and SEQ ID NO: 63; SEQ ID NO: 38 and SEQ ID NO: 64; SEQ ID NO: 38 and SEQ ID NO: 65; SEQ ID NO: 38 and SEQ ID NO: 66; SEQ ID NO: 38 and SEQ ID NO: 67; SEQ ID NO: 38 and SEQ ID NO: 68; SEQ ID NO: 38 and SEQ ID NO: 69; SEQ ID NO: 39 and SEQ ID NO: 40; SEQ ID NO: 39 and SEQ ID NO: 41; SEQ ID NO: 39 and SEQ ID NO: 42; SEQ ID NO: 39 and SEQ ID NO: 43; SEQ ID NO: 39 and SEQ ID NO: 44; SEQ ID NO: 39 and SEQ ID NO: 45; SEQ ID NO: 39 and SEQ ID NO: 46; SEQ ID NO: 39 and SEQ ID NO: 47; SEQ ID NO: 39 and SEQ ID NO: 48; SEQ ID NO: 39 and SEQ ID NO: 53; SEQ ID NO: 39 and SEQ ID NO: 54; SEQ ID NO: 39 and SEQ ID NO: 55; SEQ ID NO: 39 and SEQ ID NO: 56; SEQ ID NO: 39 and SEQ ID NO: 57; SEQ ID NO: 39 and SEQ ID NO: 58; SEQ ID NO: 39 and SEQ ID NO: 59; SEQ ID NO: 39 and SEQ ID NO: 60; SEQ ID NO: 39 and SEQ ID NO: 61; SEQ ID NO: 39 and SEQ ID NO: 62; SEQ ID NO: 39 and SEQ ID NO: 63; SEQ ID NO: 39 and SEQ ID NO: 64; SEQ ID NO: 39 and SEQ ID NO: 65; SEQ ID NO: 39 and SEQ ID NO: 66; SEQ ID NO: 39 and SEQ ID NO: 67; SEQ ID NO: 39 and SEQ ID NO: 68; SEQ ID NO: 39 and SEQ ID NO: 69; SEQ ID NO: 40 and SEQ ID NO: 41; SEQ ID NO: 40 and SEQ ID NO: 42; SEQ ID NO: 40 and SEQ ID NO: 43; SEQ ID NO: 40 and SEQ ID NO: 44; SEQ ID NO: 40 and SEQ ID NO: 45; SEQ ID NO: 40 and SEQ ID NO: 46; SEQ ID NO: 40 and SEQ ID NO: 47; SEQ ID NO: 40 and SEQ ID NO: 48; SEQ ID NO: 40 and SEQ ID NO: 53; SEQ ID NO: 40 and SEQ ID NO: 54; SEQ ID NO: 40 and SEQ ID NO: 55; SEQ ID NO: 40 and SEQ ID NO: 56; SEQ ID NO: 40 and SEQ ID NO: 57; SEQ ID NO: 40 and SEQ ID NO: 58; SEQ ID NO: 40 and SEQ ID NO: 59; SEQ ID NO: 40 and SEQ ID NO: 60; SEQ ID NO: 40 and SEQ ID NO: 61; SEQ ID NO: 40 and SEQ ID NO: 62; SEQ ID NO: 40 and SEQ ID NO: 63; SEQ ID NO: 40 and SEQ ID NO: 64; SEQ ID NO: 40 and SEQ ID NO: 65; SEQ ID NO: 40 and SEQ ID NO: 66; SEQ ID NO: 40 and SEQ ID NO: 67; SEQ ID NO: 40 and SEQ ID NO: 68; SEQ ID NO: 40 and SEQ ID NO: 69; SEQ ID NO: 41 and SEQ ID NO: 42; SEQ ID NO: 41 and SEQ ID NO: 43; SEQ ID NO: 41 and SEQ ID NO: 44; SEQ ID NO: 41 and SEQ ID NO: 45; SEQ ID NO: 41 and SEQ ID NO: 46; SEQ ID NO: 41 and SEQ ID NO: 47; SEQ ID NO: 41 and SEQ ID NO: 48; SEQ ID NO: 41 and SEQ ID NO: 53; SEQ ID NO: 41 and SEQ ID NO: 54; SEQ ID NO: 41 and SEQ ID NO: 55; SEQ ID NO: 41 and SEQ ID NO: 56; SEQ ID NO: 41 and SEQ ID NO: 57; SEQ ID NO: 41 and SEQ ID NO: 58; SEQ ID NO: 41 and SEQ ID NO: 59; SEQ ID NO: 41 and SEQ ID NO: 60; SEQ ID NO: 41 and SEQ ID NO: 61; SEQ ID NO: 41 and SEQ ID NO: 62; SEQ ID NO: 41 and SEQ ID NO: 63; SEQ ID NO: 41 and SEQ ID NO: 64; SEQ ID NO: 41 and SEQ ID NO: 65; SEQ ID NO: 41 and SEQ ID NO: 66; SEQ ID NO: 41 and SEQ ID NO: 67; SEQ ID NO: 41 and SEQ ID NO: 68; SEQ ID NO: 41 and SEQ ID NO: 69; SEQ ID NO: 42 and SEQ ID NO: 43; SEQ ID NO: 42 and SEQ ID NO: 44; SEQ ID NO: 42 and SEQ ID NO: 45; SEQ ID NO: 42 and SEQ ID NO: 46; SEQ ID NO: 42 and SEQ ID NO: 47; SEQ ID NO: 42 and SEQ ID NO: 48; SEQ ID NO: 42 and SEQ ID NO: 53; SEQ ID NO: 42 and SEQ ID NO: 54; SEQ ID NO: 42 and SEQ ID NO: 55; SEQ ID NO: 42 and SEQ ID NO: 56; SEQ ID NO: 42 and SEQ ID NO: 57; SEQ ID NO: 42 and SEQ ID NO: 58; SEQ ID NO: 42 and SEQ ID NO: 59; SEQ ID NO: 42 and SEQ ID NO: 60; SEQ ID NO: 42 and SEQ ID NO: 61; SEQ ID NO: 42 and SEQ ID NO: 62; SEQ ID NO: 42 and SEQ ID NO: 63; SEQ ID NO: 42 and SEQ ID NO: 64; SEQ ID NO: 42 and SEQ ID NO: 65; SEQ ID NO: 42 and SEQ ID NO: 66; SEQ ID NO: 42 and SEQ ID NO: 67; SEQ ID NO: 42 and SEQ ID NO: 68; SEQ ID NO: 42 and SEQ ID NO: 69; SEQ ID NO: 43 and SEQ ID NO: 44; SEQ ID NO: 43 and SEQ ID NO: 45; SEQ ID NO: 43 and SEQ ID NO: 46; SEQ ID NO: 43 and SEQ ID NO: 47; SEQ ID NO: 43 and SEQ ID NO: 48; SEQ ID NO: 43 and SEQ ID NO: 53; SEQ ID NO: 43 and SEQ ID NO: 54; SEQ ID NO: 43 and SEQ ID NO: 55; SEQ ID NO: 43 and SEQ ID NO: 56; SEQ ID NO: 43 and SEQ ID NO: 57; SEQ ID NO: 43 and SEQ ID NO: 58; SEQ ID NO: 43 and SEQ ID NO: 59; SEQ ID NO: 43 and SEQ ID NO: 60; SEQ ID NO: 43 and SEQ ID NO: 61; SEQ ID NO: 43 and SEQ ID NO: 62; SEQ ID NO: 43 and SEQ ID NO: 63; SEQ ID NO: 43 and SEQ ID NO: 64; SEQ ID NO: 43 and SEQ ID NO: 65; SEQ ID NO: 43 and SEQ ID NO: 66; SEQ ID NO: 43 and SEQ ID NO: 67; SEQ ID NO: 43 and SEQ ID NO: 68; SEQ ID NO: 43 and SEQ ID NO: 69; SEQ ID NO: 44 and SEQ ID NO: 45; SEQ ID NO: 44 and SEQ ID NO: 46; SEQ ID NO: 44 and SEQ ID NO: 47; SEQ ID NO: 44 and SEQ ID NO: 48; SEQ ID NO: 44 and SEQ ID NO: 53; SEQ ID NO: 44 and SEQ ID NO: 54; SEQ ID NO: 44 and SEQ ID NO: 55; SEQ ID NO: 44 and SEQ ID NO: 56; SEQ ID NO: 44 and SEQ ID NO: 57; SEQ ID NO: 44 and SEQ ID NO: 58; SEQ ID NO: 44 and SEQ ID NO: 59; SEQ ID NO: 44 and SEQ ID NO: 60; SEQ ID NO: 44 and SEQ ID NO: 61; SEQ ID NO: 44 and SEQ ID NO: 62; SEQ ID NO: 44 and SEQ ID NO: 63; SEQ ID NO: 44 and SEQ ID NO: 64; SEQ ID NO: 44 and SEQ ID NO: 65; SEQ ID NO: 44 and SEQ ID NO: 66; SEQ ID NO: 44 and SEQ ID NO: 67; SEQ ID NO: 44 and SEQ ID NO: 68; SEQ ID NO: 44 and SEQ ID NO: 69; SEQ ID NO: 45 and SEQ ID NO: 46; SEQ ID NO: 45 and SEQ ID NO: 47; SEQ ID NO: 45 and SEQ ID NO: 48; SEQ ID NO: 45 and SEQ ID NO: 53; SEQ ID NO: 45 and SEQ ID NO: 54; SEQ ID NO: 45 and SEQ ID NO: 55; SEQ ID NO: 45 and SEQ ID NO: 56; SEQ ID NO: 45 and SEQ ID NO: 57; SEQ ID NO: 45 and SEQ ID NO: 58; SEQ ID NO: 45 and SEQ ID NO: 59; SEQ ID NO: 45 and SEQ ID NO: 60; SEQ ID NO: 45 and SEQ ID NO: 61; SEQ ID NO: 45 and SEQ ID NO: 62; SEQ ID NO: 45 and SEQ ID NO: 63; SEQ ID NO: 45 and SEQ ID NO: 64; SEQ ID NO: 45 and SEQ ID NO: 65; SEQ ID NO: 45 and SEQ ID NO: 66; SEQ ID NO: 45 and SEQ ID NO: 67; SEQ ID NO: 45 and SEQ ID NO: 68; SEQ ID NO: 45 and SEQ ID NO: 69; SEQ ID NO: 46 and SEQ ID NO: 47; SEQ ID NO: 46 and SEQ ID NO: 48; SEQ ID NO: 46 and SEQ ID NO: 53; SEQ ID NO: 46 and SEQ ID NO: 54; SEQ ID NO: 46 and SEQ ID NO: 55; SEQ ID NO: 46 and SEQ ID NO: 56; SEQ ID NO: 46 and SEQ ID NO: 57; SEQ ID NO: 46 and SEQ ID NO: 58; SEQ ID NO: 46 and SEQ ID NO: 59; SEQ ID NO: 46 and SEQ ID NO: 60; SEQ ID NO: 46 and SEQ ID NO: 61; SEQ ID NO: 46 and SEQ ID NO: 62; SEQ ID NO: 46 and SEQ ID NO: 63; SEQ ID NO: 46 and SEQ ID NO: 64; SEQ ID NO: 46 and SEQ ID NO: 65; SEQ ID NO: 46 and SEQ ID NO: 66; SEQ ID NO: 46 and SEQ ID NO: 67; SEQ ID NO: 46 and SEQ ID NO: 68; SEQ ID NO: 46 and SEQ ID NO: 69; SEQ ID NO: 47 and SEQ ID NO: 48; SEQ ID NO: 47 and SEQ ID NO: 53; SEQ ID NO: 47 and SEQ ID NO: 54; SEQ ID NO: 47 and SEQ ID NO: 55; SEQ ID NO: 47 and SEQ ID NO: 56; SEQ ID NO: 47 and SEQ ID NO: 57; SEQ ID NO: 47 and SEQ ID NO: 58; SEQ ID NO: 47 and SEQ ID NO: 59; SEQ ID NO: 47 and SEQ ID NO: 60; SEQ ID NO: 47 and SEQ ID NO: 61; SEQ ID NO: 47 and SEQ ID NO: 62; SEQ ID NO: 47 and SEQ ID NO: 63; SEQ ID NO: 47 and SEQ ID NO: 64; SEQ ID NO: 47 and SEQ ID NO: 65; SEQ ID NO: 47 and SEQ ID NO: 66; SEQ ID NO: 47 and SEQ ID NO: 67; SEQ ID NO: 47 and SEQ ID NO: 68; SEQ ID NO: 47 and SEQ ID NO: 69; SEQ ID NO: 48 and SEQ ID NO: 53; SEQ ID NO: 48 and SEQ ID NO: 54; SEQ ID NO: 48 and SEQ ID NO: 55; SEQ ID NO: 48 and SEQ ID NO: 56; SEQ ID NO: 48 and SEQ ID NO: 57; SEQ ID NO: 48 and SEQ ID NO: 58; SEQ ID NO: 48 and SEQ ID NO: 59; SEQ ID NO: 48 and SEQ ID NO: 60; SEQ ID NO: 48 and SEQ ID NO: 61; SEQ ID NO: 48 and SEQ ID NO: 62; SEQ ID NO: 48 and SEQ ID NO: 63; SEQ ID NO: 48 and SEQ ID NO: 64; SEQ ID NO: 48 and SEQ ID NO: 65; SEQ ID NO: 48 and SEQ ID NO: 66; SEQ ID NO: 48 and SEQ ID NO: 67; SEQ ID NO: 48 and SEQ ID NO: 68; SEQ ID NO: 48 and SEQ ID NO: 69; SEQ ID NO: 53 and SEQ ID NO: 54; SEQ ID NO: 53 and SEQ ID NO: 55; SEQ ID NO: 53 and SEQ ID NO: 56; SEQ ID NO: 53 and SEQ ID NO: 57; SEQ ID NO: 53 and SEQ ID NO: 58; SEQ ID NO: 53 and SEQ ID NO: 59; SEQ ID NO: 53 and SEQ ID NO: 60; SEQ ID NO: 53 and SEQ ID NO: 61; SEQ ID NO: 53 and SEQ ID NO: 62; SEQ ID NO: 53 and SEQ ID NO: 63; SEQ ID NO: 53 and SEQ ID NO: 64; SEQ ID NO: 53 and SEQ ID NO: 65; SEQ ID NO: 53 and SEQ ID NO: 66; SEQ ID NO: 53 and SEQ ID NO: 67; SEQ ID NO: 53 and SEQ ID NO: 68; SEQ ID NO: 53 and SEQ ID NO: 69; SEQ ID NO: 54 and SEQ ID NO: 55; SEQ ID NO: 54 and SEQ ID NO: 56; SEQ ID NO: 54 and SEQ ID NO: 57; SEQ ID NO: 54 and SEQ ID NO: 58; SEQ ID NO: 54 and SEQ ID NO: 59; SEQ ID NO: 54 and SEQ ID NO: 60; SEQ ID NO: 54 and SEQ ID NO: 61; SEQ ID NO: 54 and SEQ ID NO: 62; SEQ ID NO: 54 and SEQ ID NO: 63; SEQ ID NO: 54 and SEQ ID NO: 64; SEQ ID NO: 54 and SEQ ID NO: 65; SEQ ID NO: 54 and SEQ ID NO: 66; SEQ ID NO: 54 and SEQ ID NO: 67; SEQ ID NO: 54 and SEQ ID NO: 68; SEQ ID NO: 54 and SEQ ID NO: 69; SEQ ID NO: 55 and SEQ ID NO: 56; SEQ ID NO: 55 and SEQ ID NO: 57; SEQ ID NO: 55 and SEQ ID NO: 58; SEQ ID NO: 55 and SEQ ID NO: 59; SEQ ID NO: 55 and SEQ ID NO: 60; SEQ ID NO: 55 and SEQ ID NO: 61; SEQ ID NO: 55 and SEQ ID NO: 62; SEQ ID NO: 55 and SEQ ID NO: 63; SEQ ID NO: 55 and SEQ ID NO: 64; SEQ ID NO: 55 and SEQ ID NO: 65; SEQ ID NO: 55 and SEQ ID NO: 66; SEQ ID NO: 55 and SEQ ID NO: 67; SEQ ID NO: 55 and SEQ ID NO: 68; SEQ ID NO: 55 and SEQ ID NO: 69; SEQ ID NO: 56 and SEQ ID NO: 57; SEQ ID NO: 56 and SEQ ID NO: 58; SEQ ID NO: 56 and SEQ ID NO: 59; SEQ ID NO: 56 and SEQ ID NO: 60; SEQ ID NO: 56 and SEQ ID NO: 61; SEQ ID NO: 56 and SEQ ID NO: 62; SEQ ID NO: 56 and SEQ ID NO: 63; SEQ ID NO: 56 and SEQ ID NO: 64; SEQ ID NO: 56 and SEQ ID NO: 65; SEQ ID NO: 56 and SEQ ID NO: 66; SEQ ID NO: 56 and SEQ ID NO: 67; SEQ ID NO: 56 and SEQ ID NO: 68; SEQ ID NO: 56 and SEQ ID NO: 69; SEQ ID NO: 57 and SEQ ID NO: 58; SEQ ID NO: 57 and SEQ ID NO: 59; SEQ ID NO: 57 and SEQ ID NO: 60; SEQ ID NO: 57 and SEQ ID NO: 61; SEQ ID NO: 57 and SEQ ID NO: 62; SEQ ID NO: 57 and SEQ ID NO: 63; SEQ ID NO: 57 and SEQ ID NO: 64; SEQ ID NO: 57 and SEQ ID NO: 65; SEQ ID NO: 57 and SEQ ID NO: 66; SEQ ID NO: 57 and SEQ ID NO: 67; SEQ ID NO: 57 and SEQ ID NO: 68; SEQ ID NO: 57 and SEQ ID NO: 69; SEQ ID NO: 58 and SEQ ID NO: 59; SEQ ID NO: 58 and SEQ ID NO: 60; SEQ ID NO: 58 and SEQ ID NO: 61; SEQ ID NO: 58 and SEQ ID NO: 62; SEQ ID NO: 58 and SEQ ID NO: 63; SEQ ID NO: 58 and SEQ ID NO: 64; SEQ ID NO: 58 and SEQ ID NO: 65; SEQ ID NO: 58 and SEQ ID NO: 66; SEQ ID NO: 58 and SEQ ID NO: 67; SEQ ID NO: 58 and SEQ ID NO: 68; SEQ ID NO: 58 and SEQ ID NO: 69; SEQ ID NO: 59 and SEQ ID NO: 60; SEQ ID NO: 59 and SEQ ID NO: 61; SEQ ID NO: 59 and SEQ ID NO: 62; SEQ ID NO: 59 and SEQ ID NO: 63; SEQ ID NO: 59 and SEQ ID NO: 64; SEQ ID NO: 59 and SEQ ID NO: 65; SEQ ID NO: 59 and SEQ ID NO: 66; SEQ ID NO: 59 and SEQ ID NO: 67; SEQ ID NO: 59 and SEQ ID NO: 68; SEQ ID NO: 59 and SEQ ID NO: 69; SEQ ID NO: 60 and SEQ ID NO: 61; SEQ ID NO: 60 and SEQ ID NO: 62; SEQ ID NO: 60 and SEQ ID NO: 63; SEQ ID NO: 60 and SEQ ID NO: 64; SEQ ID NO: 60 and SEQ ID NO: 65; SEQ ID NO: 60 and SEQ ID NO: 66; SEQ ID NO: 60 and SEQ ID NO: 67; SEQ ID NO: 60 and SEQ ID NO: 68; SEQ ID NO: 60 and SEQ ID NO: 69; SEQ ID NO: 61 and SEQ ID NO: 62; SEQ ID NO: 61 and SEQ ID NO: 63; SEQ ID NO: 61 and SEQ ID NO: 64; SEQ ID NO: 61 and SEQ ID NO: 65; SEQ ID NO: 61 and SEQ ID NO: 66; SEQ ID NO: 61 and SEQ ID NO: 67; SEQ ID NO: 61 and SEQ ID NO: 68; SEQ ID NO: 61 and SEQ ID NO: 69; SEQ ID NO: 62 and SEQ ID NO: 63; SEQ ID NO: 62 and SEQ ID NO: 64; SEQ ID NO: 62 and SEQ ID NO: 65; SEQ ID NO: 62 and SEQ ID NO: 66; SEQ ID NO: 62 and SEQ ID NO: 67; SEQ ID NO: 62 and SEQ ID NO: 68; SEQ ID NO: 62 and SEQ ID NO: 69; SEQ ID NO: 63 and SEQ ID NO: 64; SEQ ID NO: 63 and SEQ ID NO: 65; SEQ ID NO: 63 and SEQ ID NO: 66; SEQ ID NO: 63 and SEQ ID NO: 67; SEQ ID NO: 63 and SEQ ID NO: 68; SEQ ID NO: 63 and SEQ ID NO: 69; SEQ ID NO: 64 and SEQ ID NO: 65; SEQ ID NO: 64 and SEQ ID NO: 66; SEQ ID NO: 64 and SEQ ID NO: 67; SEQ ID NO: 64 and SEQ ID NO: 68; SEQ ID NO: 64 and SEQ ID NO: 69; SEQ ID NO: 65 and SEQ ID NO: 66; SEQ ID NO: 65 and SEQ ID NO: 67; SEQ ID NO: 65 and SEQ ID NO: 68; SEQ ID NO: 65 and SEQ ID NO: 69; SEQ ID NO: 66 and SEQ ID NO: 67; SEQ ID NO: 66 and SEQ ID NO: 68; SEQ ID NO: 66 and SEQ ID NO: 69; SEQ ID NO: 67 and SEQ ID NO: 68; SEQ ID NO: 67 and SEQ ID NO: 69; SEQ ID NO: 68 and SEQ ID NO: 69; and a nucleic acid encoding a Staphylococcus aureus Cas9 (SaCas9), wherein the nucleic acid encoding the SaCas9 may be on the same or different nucleic acid molecule as the pair of guide RNAs.

[0297] In some embodiments, methods are provided for treating Duchenne Muscular Dystrophy (DMD), the method comprising delivering to a cell at least one nucleic acid molecule comprising a pair of guide RNAs comprising a first and second spacer sequence, wherein the pair of first and spacer sequences are selected from any one of the following pairs: SEQ ID NO: 243 and SEQ ID NO: 244; SEQ ID NO: 243 and SEQ ID NO: 245; SEQ ID NO: 243 and SEQ ID NO: 246; SEQ ID NO: 243 and SEQ ID NO: 247; SEQ ID NO: 243 and SEQ ID NO: 248; SEQ ID NO: 243 and SEQ ID NO: 249; SEQ ID NO: 243 and SEQ ID NO: 250; SEQ ID NO: 243 and SEQ ID NO: 251; SEQ ID NO: 243 and SEQ ID NO: 252; SEQ ID NO: 243 and SEQ ID NO: 253; SEQ ID NO: 243 and SEQ ID NO: 254; SEQ ID NO: 243 and SEQ ID NO: 255; SEQ ID NO: 243 and SEQ ID NO: 256; SEQ ID NO: 243 and SEQ ID NO: 257; SEQ ID NO: 243 and SEQ ID NO: 258; SEQ ID NO: 243 and SEQ ID NO: 259; SEQ ID NO: 243 and SEQ ID NO: 260; SEQ ID NO: 243 and SEQ ID NO: 261; SEQ ID NO: 243 and SEQ ID NO: 262; SEQ ID NO: 243 and SEQ ID NO: 263; SEQ ID NO: 243 and SEQ ID NO: 264; SEQ ID NO: 243 and SEQ ID NO: 265; SEQ ID NO: 243 and SEQ ID NO: 266; SEQ ID NO: 243 and SEQ ID NO: 267; SEQ ID NO: 243 and SEQ ID NO: 268; SEQ ID NO: 243 and SEQ ID NO: 269; SEQ ID NO: 244 and SEQ ID NO: 245; SEQ ID NO: 244 and SEQ ID NO: 246; SEQ ID NO: 244 and SEQ ID NO: 247; SEQ ID NO: 244 and SEQ ID NO: 248; SEQ ID NO: 244 and SEQ ID NO: 249; SEQ ID NO: 244 and SEQ ID NO: 250; SEQ ID NO: 244 and SEQ ID NO: 251; SEQ ID NO: 244 and SEQ ID NO: 252; SEQ ID NO: 244 and SEQ ID NO: 253; SEQ ID NO: 244 and SEQ ID NO: 254; SEQ ID NO: 244 and SEQ ID NO: 255; SEQ ID NO: 244 and SEQ ID NO: 256; SEQ ID NO: 244 and SEQ ID NO: 257; SEQ ID NO: 244 and SEQ ID NO: 258; SEQ ID NO: 244 and SEQ ID NO: 259; SEQ ID NO: 244 and SEQ ID NO: 260; SEQ ID NO: 244 and SEQ ID NO: 261; SEQ ID NO: 244 and SEQ ID NO: 262; SEQ ID NO: 244 and SEQ ID NO: 263; SEQ ID NO: 244 and SEQ ID NO: 264; SEQ ID NO: 244 and SEQ ID NO: 265; SEQ ID NO: 244 and SEQ ID NO: 266; SEQ ID NO: 244 and SEQ ID NO: 267; SEQ ID NO: 244 and SEQ ID NO: 268; SEQ ID NO: 244 and SEQ ID NO: 269; SEQ ID NO: 245 and SEQ ID NO: 246; SEQ ID NO: 245 and SEQ ID NO: 247; SEQ ID NO: 245 and SEQ ID NO: 248; SEQ ID NO: 245 and SEQ ID NO: 249; SEQ ID NO: 245 and SEQ ID NO: 250; SEQ ID NO: 245 and SEQ ID NO: 251; SEQ ID NO: 245 and SEQ ID NO: 252; SEQ ID NO: 245 and SEQ ID NO: 253; SEQ ID NO: 245 and SEQ ID NO: 254; SEQ ID NO: 245 and SEQ ID NO: 255; SEQ ID NO: 245 and SEQ ID NO: 256; SEQ ID NO: 245 and SEQ ID NO: 257; SEQ ID NO: 245 and SEQ ID NO: 258; SEQ ID NO: 245 and SEQ ID NO: 259; SEQ ID NO: 245 and SEQ ID NO: 260; SEQ ID NO: 245 and SEQ ID NO: 261; SEQ ID NO: 245 and SEQ ID NO: 262; SEQ ID NO: 245 and SEQ ID NO: 263; SEQ ID NO: 245 and SEQ ID NO: 264; SEQ ID NO: 245 and SEQ ID NO: 265; SEQ ID NO: 245 and SEQ ID NO: 266; SEQ ID NO: 245 and SEQ ID NO: 267; SEQ ID NO: 245 and SEQ ID NO: 268; SEQ ID NO: 245 and SEQ ID NO: 269; SEQ ID NO: 246 and SEQ ID NO: 247; SEQ ID NO: 246 and SEQ ID NO: 248; SEQ ID NO: 246 and SEQ ID NO: 249; SEQ ID NO: 246 and SEQ ID NO: 250; SEQ ID NO: 246 and SEQ ID NO: 251; SEQ ID NO: 246 and SEQ ID NO: 252; SEQ ID NO: 246 and SEQ ID NO: 253; SEQ ID NO: 246 and SEQ ID NO: 254; SEQ ID NO: 246 and SEQ ID NO: 255; SEQ ID NO: 246 and SEQ ID NO: 256; SEQ ID NO: 246 and SEQ ID NO: 257; SEQ ID NO: 246 and SEQ ID NO: 258; SEQ ID NO: 246 and SEQ ID NO: 259; SEQ ID NO: 246 and SEQ ID NO: 260; SEQ ID NO: 246 and SEQ ID NO: 261; SEQ ID NO: 246 and SEQ ID NO: 262; SEQ ID NO: 246 and SEQ ID NO: 263; SEQ ID NO: 246 and SEQ ID NO: 264; SEQ ID NO: 246 and SEQ ID NO: 265; SEQ ID NO: 246 and SEQ ID NO: 266; SEQ ID NO: 246 and SEQ ID NO: 267; SEQ ID NO: 246 and SEQ ID NO: 268; SEQ ID NO: 246 and SEQ ID NO: 269; SEQ ID NO: 247 and SEQ ID NO: 248; SEQ ID NO: 247 and SEQ ID NO: 249; SEQ ID NO: 247 and SEQ ID NO: 250; SEQ ID NO: 247 and SEQ ID NO: 251; SEQ ID NO: 247 and SEQ ID NO: 252; SEQ ID NO: 247 and SEQ ID NO: 253; SEQ ID NO: 247 and SEQ ID NO: 254; SEQ ID NO: 247 and SEQ ID NO: 255; SEQ ID NO: 247 and SEQ ID NO: 256; SEQ ID NO: 247 and SEQ ID NO: 257; SEQ ID NO: 247 and SEQ ID NO: 258; SEQ ID NO: 247 and SEQ ID NO: 259; SEQ ID NO: 247 and SEQ ID NO: 260; SEQ ID NO: 247 and SEQ ID NO: 261; SEQ ID NO: 247 and SEQ ID NO: 262; SEQ ID NO: 247 and SEQ ID NO: 263; SEQ ID NO: 247 and SEQ ID NO: 264; SEQ ID NO: 247 and SEQ ID NO: 265; SEQ ID NO: 247 and SEQ ID NO: 266; SEQ ID NO: 247 and SEQ ID NO: 267; SEQ ID NO: 247 and SEQ ID NO: 268; SEQ ID NO: 247 and SEQ ID NO: 269; SEQ ID NO: 248 and SEQ ID NO: 249; SEQ ID NO: 248 and SEQ ID NO: 250; SEQ ID NO: 248 and SEQ ID NO: 251; SEQ ID NO: 248 and SEQ ID NO: 252; SEQ ID NO: 248 and SEQ ID NO: 253; SEQ ID NO: 248 and SEQ ID NO: 254; SEQ ID NO: 248 and SEQ ID NO: 255; SEQ ID NO: 248 and SEQ ID NO: 256; SEQ ID NO: 248 and SEQ ID NO: 257; SEQ ID NO: 248 and SEQ ID NO: 258; SEQ ID NO: 248 and SEQ ID NO: 259; SEQ ID NO: 248 and SEQ ID NO: 260; SEQ ID NO: 248 and SEQ ID NO: 261; SEQ ID NO: 248 and SEQ ID NO: 262; SEQ ID NO: 248 and SEQ ID NO: 263; SEQ ID NO: 248 and SEQ ID NO: 264; SEQ ID NO: 248 and SEQ ID NO: 265; SEQ ID NO: 248 and SEQ ID NO: 266; SEQ ID NO: 248 and SEQ ID NO: 267; SEQ ID NO: 248 and SEQ ID NO: 268; SEQ ID NO: 248 and SEQ ID NO: 269; SEQ ID NO: 249 and SEQ ID NO: 250; SEQ ID NO: 249 and SEQ ID NO: 251; SEQ ID NO: 249 and SEQ ID NO: 252; SEQ ID NO: 249 and SEQ ID NO: 253; SEQ ID NO: 249 and SEQ ID NO: 254; SEQ ID NO: 249 and SEQ ID NO: 255; SEQ ID NO: 249 and SEQ ID NO: 256; SEQ ID NO: 249 and SEQ ID NO: 257; SEQ ID NO: 249 and SEQ ID NO: 258; SEQ ID NO: 249 and SEQ ID NO: 259; SEQ ID NO: 249 and SEQ ID NO: 260; SEQ ID NO: 249 and SEQ ID NO: 261; SEQ ID NO: 249 and SEQ ID NO: 262; SEQ ID NO: 249 and SEQ ID NO: 263; SEQ ID NO: 249 and SEQ ID NO: 264; SEQ ID NO: 249 and SEQ ID NO: 265; SEQ ID NO: 249 and SEQ ID NO: 266; SEQ ID NO: 249 and SEQ ID NO: 267; SEQ ID NO: 249 and SEQ ID NO: 268; SEQ ID NO: 249 and SEQ ID NO: 269; SEQ ID NO: 250 and SEQ ID NO: 251; SEQ ID NO: 250 and SEQ ID NO: 252; SEQ ID NO: 250 and SEQ ID NO: 253; SEQ ID NO: 250 and SEQ ID NO: 254; SEQ ID NO: 250 and SEQ ID NO: 255; SEQ ID NO: 250 and SEQ ID NO: 256; SEQ ID NO: 250 and SEQ ID NO: 257; SEQ ID NO: 250 and SEQ ID NO: 258; SEQ ID NO: 250 and SEQ ID NO: 259; SEQ ID NO: 250 and SEQ ID NO: 260; SEQ ID NO: 250 and SEQ ID NO: 261; SEQ ID NO: 250 and SEQ ID NO: 262; SEQ ID NO: 250 and SEQ ID NO: 263; SEQ ID NO: 250 and SEQ ID NO: 264; SEQ ID NO: 250 and SEQ ID NO: 265; SEQ ID NO: 250 and SEQ ID NO: 266; SEQ ID NO: 250 and SEQ ID NO: 267; SEQ ID NO: 250 and SEQ ID NO: 268; SEQ ID NO: 250 and SEQ ID NO: 269; SEQ ID NO: 251 and SEQ ID NO: 252; SEQ ID NO: 251 and SEQ ID NO: 253; SEQ ID NO: 251 and SEQ ID NO: 254; SEQ ID NO: 251 and SEQ ID NO: 255; SEQ ID NO: 251 and SEQ ID NO: 256; SEQ ID NO: 251 and SEQ ID NO: 257; SEQ ID NO: 251 and SEQ ID NO: 258; SEQ ID NO: 251 and SEQ ID NO: 259; SEQ ID NO: 251 and SEQ ID NO: 260; SEQ ID NO: 251 and SEQ ID NO: 261; SEQ ID NO: 251 and SEQ ID NO: 262; SEQ ID NO: 251 and SEQ ID NO: 263; SEQ ID NO: 251 and SEQ ID NO: 264; SEQ ID NO: 251 and SEQ ID NO: 265; SEQ ID NO: 251 and SEQ ID NO: 266; SEQ ID NO: 251 and SEQ ID NO: 267; SEQ ID NO: 251 and SEQ ID NO: 268; SEQ ID NO: 251 and SEQ ID NO: 269; SEQ ID NO: 252 and SEQ ID NO: 253; SEQ ID NO: 252 and SEQ ID NO: 254; SEQ ID NO: 252 and SEQ ID NO: 255; SEQ ID NO: 252 and SEQ ID NO: 256; SEQ ID NO: 252 and SEQ ID NO: 257; SEQ ID NO: 252 and SEQ ID NO: 258; SEQ ID NO: 252 and SEQ ID NO: 259; SEQ ID NO: 252 and SEQ ID NO: 260; SEQ ID NO: 252 and SEQ ID NO: 261; SEQ ID NO: 252 and SEQ ID NO: 262; SEQ ID NO: 252 and SEQ ID NO: 263; SEQ ID NO: 252 and SEQ ID NO: 264; SEQ ID NO: 252 and SEQ ID NO: 265; SEQ ID NO: 252 and SEQ ID NO: 266; SEQ ID NO: 252 and SEQ ID NO: 267; SEQ ID NO: 252 and SEQ ID NO: 268; SEQ ID NO: 252 and SEQ ID NO: 269; SEQ ID NO: 253 and SEQ ID NO: 254; SEQ ID NO: 253 and SEQ ID NO: 255; SEQ ID NO: 253 and SEQ ID NO: 256; SEQ ID NO: 253 and SEQ ID NO: 257; SEQ ID NO: 253 and SEQ ID NO: 258; SEQ ID NO: 253 and SEQ ID NO: 259; SEQ ID NO: 253 and SEQ ID NO: 260; SEQ ID NO: 253 and SEQ ID NO: 261; SEQ ID NO: 253 and SEQ ID NO: 262; SEQ ID NO: 253 and SEQ ID NO: 263; SEQ ID NO: 253 and SEQ ID NO: 264; SEQ ID NO: 253 and SEQ ID NO: 265; SEQ ID NO: 253 and SEQ ID NO: 266; SEQ ID NO: 253 and SEQ ID NO: 267; SEQ ID NO: 253 and SEQ ID NO: 268; SEQ ID NO: 253 and SEQ ID NO: 269; SEQ ID NO: 254 and SEQ ID NO: 255; SEQ ID NO: 254 and SEQ ID NO: 256; SEQ ID NO: 254 and SEQ ID NO: 257; SEQ ID NO: 254 and SEQ ID NO: 258; SEQ ID NO: 254 and SEQ ID NO: 259; SEQ ID NO: 254 and SEQ ID NO: 260; SEQ ID NO: 254 and SEQ ID NO: 261; SEQ ID NO: 254 and SEQ ID NO: 262; SEQ ID NO: 254 and SEQ ID NO: 263; SEQ ID NO: 254 and SEQ ID NO: 264; SEQ ID NO: 254 and SEQ ID NO: 265; SEQ ID NO: 254 and SEQ ID NO: 266; SEQ ID NO: 254 and SEQ ID NO: 267; SEQ ID NO: 254 and SEQ ID NO: 268; SEQ ID NO: 254 and SEQ ID NO: 269; SEQ ID NO: 255 and SEQ ID NO: 256; SEQ ID NO: 255 and SEQ ID NO: 257; SEQ ID NO: 255 and SEQ ID NO: 258; SEQ ID NO: 255 and SEQ ID NO: 259; SEQ ID NO: 255 and SEQ ID NO: 260; SEQ ID NO: 255 and SEQ ID NO: 261; SEQ ID NO: 255 and SEQ ID NO: 262; SEQ ID NO: 255 and SEQ ID NO: 263; SEQ ID NO: 255 and SEQ ID NO: 264; SEQ ID NO: 255 and SEQ ID NO: 265; SEQ ID NO: 255 and SEQ ID NO: 266; SEQ ID NO: 255 and SEQ ID NO: 267; SEQ ID NO: 255 and SEQ ID NO: 268; SEQ ID NO: 255 and SEQ ID NO: 269; SEQ ID NO: 256 and SEQ ID NO: 257; SEQ ID NO: 256 and SEQ ID NO: 258; SEQ ID NO: 256 and SEQ ID NO: 259; SEQ ID NO: 256 and SEQ ID NO: 260; SEQ ID NO: 256 and SEQ ID NO: 261; SEQ ID NO: 256 and SEQ ID NO: 262; SEQ ID NO: 256 and SEQ ID NO: 263; SEQ ID NO: 256 and SEQ ID NO: 264; SEQ ID NO: 256 and SEQ ID NO: 265; SEQ ID NO: 256 and SEQ ID NO: 266; SEQ ID NO: 256 and SEQ ID NO: 267; SEQ ID NO: 256 and SEQ ID NO: 268; SEQ ID NO: 256 and SEQ ID NO: 269; SEQ ID NO: 257 and SEQ ID NO: 258; SEQ ID NO: 257 and SEQ ID NO: 259; SEQ ID NO: 257 and SEQ ID NO: 260; SEQ ID NO: 257 and SEQ ID NO: 261; SEQ ID NO: 257 and SEQ ID NO: 262; SEQ ID NO: 257 and SEQ ID NO: 263; SEQ ID NO: 257 and SEQ ID NO: 264; SEQ ID NO: 257 and SEQ ID NO: 265; SEQ ID NO: 257 and SEQ ID NO: 266; SEQ ID NO: 257 and SEQ ID NO: 267; SEQ ID NO: 257 and SEQ ID NO: 268; SEQ ID NO: 257 and SEQ ID NO: 269; SEQ ID NO: 258 and SEQ ID NO: 259; SEQ ID NO: 258 and SEQ ID NO: 260; SEQ ID NO: 258 and SEQ ID NO: 261; SEQ ID NO: 258 and SEQ ID NO: 262; SEQ ID NO: 258 and SEQ ID NO: 263; SEQ ID NO: 258 and SEQ ID NO: 264; SEQ ID NO: 258 and SEQ ID NO: 265; SEQ ID NO: 258 and SEQ ID NO: 266; SEQ ID NO: 258 and SEQ ID NO: 267; SEQ ID NO: 258 and SEQ ID NO: 268; SEQ ID NO: 258 and SEQ ID NO: 269; SEQ ID NO: 259 and SEQ ID NO: 260; SEQ ID NO: 259 and SEQ ID NO: 261; SEQ ID NO: 259 and SEQ ID NO: 262; SEQ ID NO: 259 and SEQ ID NO: 263; SEQ ID NO: 259 and SEQ ID NO: 264; SEQ ID NO: 259 and SEQ ID NO: 265; SEQ ID NO: 259 and SEQ ID NO: 266; SEQ ID NO: 259 and SEQ ID NO: 267; SEQ ID NO: 259 and SEQ ID NO: 268; SEQ ID NO: 259 and SEQ ID NO: 269; SEQ ID NO: 260 and SEQ ID NO: 261; SEQ ID NO: 260 and SEQ ID NO: 262; SEQ ID NO: 260 and SEQ ID NO: 263; SEQ ID NO: 260 and SEQ ID NO: 264; SEQ ID NO: 260 and SEQ ID NO: 265; SEQ ID NO: 260 and SEQ ID NO: 266; SEQ ID NO: 260 and SEQ ID NO: 267; SEQ ID NO: 260 and SEQ ID NO: 268; SEQ ID NO: 260 and SEQ ID NO: 269; SEQ ID NO: 261 and SEQ ID NO: 262; SEQ ID NO: 261 and SEQ ID NO: 263; SEQ ID NO: 261 and SEQ ID NO: 264; SEQ ID NO: 261 and SEQ ID NO: 265; SEQ ID NO: 261 and SEQ ID NO: 266; SEQ ID NO: 261 and SEQ ID NO: 267; SEQ ID NO: 261 and SEQ ID NO: 268; SEQ ID NO: 261 and SEQ ID NO: 269; SEQ ID NO: 262 and SEQ ID NO: 263; SEQ ID NO: 262 and SEQ ID NO: 264; SEQ ID NO: 262 and SEQ ID NO: 265; SEQ ID NO: 262 and SEQ ID NO: 266; SEQ ID NO: 262 and SEQ ID NO: 267; SEQ ID NO: 262 and SEQ ID NO: 268; SEQ ID NO: 262 and SEQ ID NO: 269; SEQ ID NO: 263 and SEQ ID NO: 264; SEQ ID NO: 263 and SEQ ID NO: 265; SEQ ID NO: 263 and SEQ ID NO: 266; SEQ ID NO: 263 and SEQ ID NO: 267; SEQ ID NO: 263 and SEQ ID NO: 268; SEQ ID NO: 263 and SEQ ID NO: 269; SEQ ID NO: 264 and SEQ ID NO: 265; SEQ ID NO: 264 and SEQ ID NO: 266; SEQ ID NO: 264 and SEQ ID NO: 267; SEQ ID NO: 264 and SEQ ID NO: 268; SEQ ID NO: 264 and SEQ ID NO: 269; SEQ ID NO: 265 and SEQ ID NO: 266; SEQ ID NO: 265 and SEQ ID NO: 267; SEQ ID NO: 265 and SEQ ID NO: 268; SEQ ID NO: 265 and SEQ ID NO: 269; SEQ ID NO: 266 and SEQ ID NO: 267; SEQ ID NO: 266 and SEQ ID NO: 268; SEQ ID NO: 266 and SEQ ID NO: 269; SEQ ID NO: 267 and SEQ ID NO: 268; SEQ ID NO: 267 and SEQ ID NO: 269; SEQ ID NO: 268 and SEQ ID NO: 269; and a nucleic acid encoding a Staphylococcus lugdunensis (SluCas9), wherein the nucleic acid encoding the SluCas9 may be on the same or different nucleic acid molecule as the pair of guide RNAs.

[0298] In some embodiments, a method for treating DMD is provided comprising administering a composition comprising one or more guide RNAs wherein each guide RNA comprises a guide sequence of Table 2, or comprises a guide sequence comprising at least 17, 18, 19, or 20 contiguous nucleotides of a guide sequence of Table 2, or is at least 90% identical to guide sequence selected from Table 2. In each instance, the composition may comprise a nucleic acid encoding the guide RNA(s). In some embodiments, a method for treating DMD is provided comprising administering a composition comprising one or more nucleic acid molecules encoding one or more guide RNAs, wherein each guide RNA comprises a guide sequence of Table 2, or at least 17, 18, 19, or 20 contiguous nucleotides of a guide sequence of Table 2, or is at least 90% identical to guide sequence selected from Table 2.

[0299] In some embodiments, a method for treating DMD is provided comprising administering a composition comprising a guide RNA wherein the guide RNA comprises a guide sequence of Table 2, or at least 17, 18, 19, or 20 contiguous nucleotides of a guide sequence of Table 2, or is at least 90% identical to guide sequence of Table 2. In each instance, the composition may comprise a nucleic acid encoding the guide RNA.

[0300] In some embodiments, a method for treating DMD is provided comprising administering a composition comprising two or more guide RNAs wherein each guide RNA comprises a guide sequence of Table 2, or at least 17, 18, 19, or 20 contiguous nucleotides of a guide sequence of Table 2, or is at least 90% identical to guide sequence selected from Table 2. In each instance, the composition may comprise a nucleic acid encoding the guide RNA.

[0301] In some embodiments, a method for treating DMD is provided comprising administering a composition comprising a SaCas9 or SluCas9 or one or more nucleic acid molecules encoding a SaCas9 or SluCas9 and a pair of guide RNAs comprising a first guide sequence and a second guide sequence, wherein the pair of guide sequences is selected from the guide sequence pairs of:
[0302] a. SEQ ID NOs: 28 and 57; 31 and 57; 31 and 46; 32 and 69; 33 and 57; 33 and 69; 34 and 57; 36 and 69; 37 and 69; 37 and 46; 39 and 46; 40 and 46; 46 and 35; 46 and 62; 46 and 65; 46 and 67; 47 and 57; 48 and 57; 49 and 57; 51 and 57; 53 and 46; 54 and 46; 55 and 46; 58 and 46; 59 and 46; 60 and 46; 61 and 69; or 69 and 30; and
[0303] b. SEQ ID NOs: 243 and 252; 245 and 252; 252 and 253; 252 and 254; 252 and 256; 252 and 257; 252 and 258; 252 and 262; 252 and 264; 252 and 265; or 252 and 266;
[0304] c. SEQ ID NO: 11 and SEQ ID NO: 12; SEQ ID NO: 11 and SEQ ID NO: 13; SEQ ID NO: 11 and SEQ ID NO: 14; SEQ ID NO: 11 and SEQ ID NO: 15; SEQ ID NO: 12 and SEQ ID NO: 13; SEQ ID NO: 12 and SEQ ID NO: 14; SEQ ID NO: 12 and SEQ ID NO: 15; SEQ ID NO: 13 and SEQ ID NO: 14; SEQ ID NO: 13 and SEQ ID NO: 15; SEQ ID NO: 14 and SEQ ID NO: 15; SEQ ID NO: 27 and SEQ ID NO: 28; SEQ ID NO: 27 and SEQ ID NO: 29; SEQ ID NO: 27 and SEQ ID NO: 30; SEQ ID NO: 27 and SEQ ID NO: 31; SEQ ID NO: 27 and SEQ ID NO: 32; SEQ ID NO: 27 and SEQ ID NO: 33; SEQ ID NO: 27 and SEQ ID NO: 34; SEQ ID NO: 27 and SEQ ID NO: 35; SEQ ID NO: 27 and SEQ ID NO: 36; SEQ ID NO: 27 and SEQ ID NO: 37; SEQ ID NO: 27 and SEQ ID NO: 38; SEQ ID NO: 27 and SEQ ID NO: 39; SEQ ID NO: 27 and SEQ ID NO: 40; SEQ ID NO: 27 and SEQ ID NO: 41; SEQ ID NO: 27 and SEQ ID NO: 42; SEQ ID NO: 27 and SEQ ID NO: 43; SEQ ID NO: 27 and SEQ ID NO: 44; SEQ ID NO: 27 and SEQ ID NO: 45; SEQ ID NO: 27 and SEQ ID NO: 46; SEQ ID NO: 27 and SEQ ID NO: 47; SEQ ID NO: 27 and SEQ ID NO: 48; SEQ ID NO: 27 and SEQ ID NO: 53; SEQ ID NO: 27 and SEQ ID NO: 54; SEQ ID NO: 27 and SEQ ID NO: 55; SEQ ID NO: 27 and SEQ ID NO: 56; SEQ ID NO: 27 and SEQ ID NO: 57; SEQ ID NO: 27 and SEQ ID NO: 58; SEQ ID NO: 27 and SEQ ID NO: 59; SEQ ID NO: 27 and SEQ ID NO: 60; SEQ ID NO: 27 and SEQ ID NO: 61; SEQ ID NO: 27 and SEQ ID NO: 62; SEQ ID NO: 27 and SEQ ID NO: 63; SEQ ID NO: 27 and SEQ ID NO: 64; SEQ ID NO: 27 and SEQ ID NO: 65; SEQ ID NO: 27 and SEQ ID NO: 66; SEQ ID NO: 27 and SEQ ID NO: 67; SEQ ID NO: 27 and SEQ ID NO: 68; SEQ ID NO: 27 and SEQ ID NO: 69; SEQ ID NO: 28 and SEQ ID NO: 29; SEQ ID NO: 28 and SEQ ID NO: 30; SEQ ID NO: 28 and SEQ ID NO: 31; SEQ ID NO: 28 and SEQ ID NO: 32; SEQ ID NO: 28 and SEQ ID NO: 33; SEQ ID NO: 28 and SEQ ID NO: 34; SEQ ID NO: 28 and SEQ ID NO: 35; SEQ ID NO: 28 and SEQ ID NO: 36; SEQ ID NO: 28 and SEQ ID NO: 37; SEQ ID NO: 28 and SEQ ID NO: 38; SEQ ID NO: 28 and SEQ ID NO: 39; SEQ ID NO: 28 and SEQ ID NO: 40; SEQ ID NO: 28 and SEQ ID NO: 41; SEQ ID NO: 28 and SEQ ID NO: 42; SEQ ID NO: 28 and SEQ ID NO: 43; SEQ ID NO: 28 and SEQ ID NO: 44; SEQ ID NO: 28 and SEQ ID NO: 45; SEQ ID NO: 28 and SEQ ID NO: 46; SEQ ID NO: 28 and SEQ ID NO: 47; SEQ ID NO: 28 and SEQ ID NO: 48; SEQ ID NO: 28 and SEQ ID NO: 53; SEQ ID NO: 28 and SEQ ID NO: 54; SEQ ID NO: 28 and SEQ ID NO: 55; SEQ ID NO: 28 and SEQ ID NO: 56; SEQ ID NO: 28 and SEQ ID NO: 57; SEQ ID NO: 28 and SEQ ID NO: 58; SEQ ID NO: 28 and SEQ ID NO: 59; SEQ ID NO: 28 and SEQ ID NO: 60; SEQ ID NO: 28 and SEQ ID NO: 61; SEQ ID NO: 28 and SEQ ID NO: 62; SEQ ID NO: 28 and SEQ ID NO: 63; SEQ ID NO: 28 and SEQ ID NO: 64; SEQ ID NO: 28 and SEQ ID NO: 65; SEQ ID NO: 28 and SEQ ID NO: 66; SEQ ID NO: 28 and SEQ ID NO: 67; SEQ ID NO: 28 and SEQ ID NO: 68; SEQ ID NO: 28 and SEQ ID NO: 69; SEQ ID NO: 29 and SEQ ID NO: 30; SEQ ID NO: 29 and SEQ ID NO: 31; SEQ ID NO: 29 and SEQ ID NO: 32; SEQ ID NO: 29 and SEQ ID NO: 33; SEQ ID NO: 29 and SEQ ID NO: 34; SEQ ID NO: 29 and SEQ ID NO: 35; SEQ ID NO: 29 and SEQ ID NO: 36; SEQ ID NO: 29 and SEQ ID NO: 37; SEQ ID NO: 29 and SEQ ID NO: 38; SEQ ID NO: 29 and SEQ ID NO: 39; SEQ ID NO: 29 and SEQ ID NO: 40; SEQ ID NO: 29 and SEQ ID NO: 41; SEQ ID NO: 29 and SEQ ID NO: 42; SEQ ID NO: 29 and SEQ ID NO: 43; SEQ ID NO: 29 and SEQ ID NO: 44; SEQ ID NO: 29 and SEQ ID NO: 45; SEQ ID NO: 29 and SEQ ID NO: 46; SEQ ID NO: 29 and SEQ ID NO: 47; SEQ ID NO: 29 and SEQ ID NO: 48; SEQ ID NO: 29 and SEQ ID NO: 53; SEQ ID NO: 29 and SEQ ID NO: 54; SEQ ID NO: 29 and SEQ ID NO: 55; SEQ ID NO: 29 and SEQ ID NO: 56; SEQ ID NO: 29 and SEQ ID NO: 57; SEQ ID NO: 29 and SEQ ID NO: 58; SEQ ID NO: 29 and SEQ ID NO: 59; SEQ ID NO: 29 and SEQ ID NO: 60; SEQ ID NO: 29 and SEQ ID NO: 61; SEQ ID NO: 29 and SEQ ID NO: 62; SEQ ID NO: 29 and SEQ ID NO: 63; SEQ ID NO: 29 and SEQ ID NO: 64; SEQ ID NO: 29 and SEQ ID NO: 65; SEQ ID NO: 29 and SEQ ID NO: 66; SEQ ID NO: 29 and SEQ ID NO: 67; SEQ ID NO: 29 and SEQ ID NO: 68; SEQ ID NO: 29 and SEQ ID NO: 69; SEQ ID NO: 30 and SEQ ID NO: 31; SEQ ID NO: 30 and SEQ ID NO: 32; SEQ ID NO: 30 and SEQ ID NO: 33; SEQ ID NO: 30 and SEQ ID NO: 34; SEQ ID NO: 30 and SEQ ID NO: 35; SEQ ID NO: 30 and SEQ ID NO: 36; SEQ ID NO: 30 and SEQ ID NO: 37; SEQ ID NO: 30 and SEQ ID NO: 38; SEQ ID NO: 30 and SEQ ID NO: 39; SEQ ID NO: 30 and SEQ ID NO: 40; SEQ ID NO: 30 and SEQ ID NO: 41; SEQ ID NO: 30 and SEQ ID NO: 42; SEQ ID NO: 30 and SEQ ID NO: 43; SEQ ID NO: 30 and SEQ ID NO: 44; SEQ ID NO: 30 and SEQ ID NO: 45; SEQ ID NO: 30 and SEQ ID NO: 46; SEQ ID NO: 30 and SEQ ID NO: 47; SEQ ID NO: 30 and SEQ ID NO: 48; SEQ ID NO: 30 and SEQ ID NO: 53; SEQ ID NO: 30 and SEQ ID NO: 54; SEQ ID NO: 30 and SEQ ID NO: 55; SEQ ID NO: 30 and SEQ ID NO: 56; SEQ ID NO: 30 and SEQ ID NO: 57; SEQ ID NO: 30 and SEQ ID NO: 58; SEQ ID NO: 30 and SEQ ID NO: 59; SEQ ID NO: 30 and SEQ ID NO: 60; SEQ ID NO: 30 and SEQ ID NO: 61; SEQ ID NO: 30 and SEQ ID NO: 62; SEQ ID NO: 30 and SEQ ID NO: 63; SEQ ID NO: 30 and SEQ ID NO: 64; SEQ ID NO: 30 and SEQ ID NO: 65; SEQ ID NO: 30 and SEQ ID NO: 66; SEQ ID NO: 30 and SEQ ID NO: 67; SEQ ID NO: 30 and SEQ ID NO: 68; SEQ ID NO: 30 and SEQ ID NO: 69; SEQ ID NO: 31 and SEQ ID NO: 32; SEQ ID NO: 31 and SEQ ID NO: 33; SEQ ID NO: 31 and SEQ ID NO: 34; SEQ ID NO: 31 and SEQ ID NO: 35; SEQ ID NO: 31 and SEQ ID NO: 36; SEQ ID NO: 31 and SEQ ID NO: 37; SEQ ID NO: 31 and SEQ ID NO: 38; SEQ ID NO: 31 and SEQ ID NO: 39; SEQ ID NO: 31 and SEQ ID NO: 40; SEQ ID NO: 31 and SEQ ID NO: 41; SEQ ID NO: 31 and SEQ ID NO: 42; SEQ ID NO: 31 and SEQ ID NO: 43; SEQ ID NO: 31 and SEQ ID NO: 44; SEQ ID NO: 31 and SEQ ID NO: 45; SEQ ID NO: 31 and SEQ ID NO: 46; SEQ ID NO: 31 and SEQ ID NO: 47; SEQ ID NO: 31 and SEQ ID NO: 48; SEQ ID NO: 31 and SEQ ID NO: 53; SEQ ID NO: 31 and SEQ ID NO: 54; SEQ ID NO: 31 and SEQ ID NO: 55; SEQ ID NO: 31 and SEQ ID NO: 56; SEQ ID NO: 31 and SEQ ID NO: 57; SEQ ID NO: 31 and SEQ ID NO: 58; SEQ ID NO: 31 and SEQ ID NO: 59; SEQ ID NO: 31 and SEQ ID NO: 60; SEQ ID NO: 31 and SEQ ID NO: 61; SEQ ID NO: 31 and SEQ ID NO: 62; SEQ ID NO: 31 and SEQ ID NO: 63; SEQ ID NO: 31 and SEQ ID NO: 64; SEQ ID NO: 31 and SEQ ID NO: 65; SEQ ID NO: 31 and SEQ ID NO: 66; SEQ ID NO: 31 and SEQ ID NO: 67; SEQ ID NO: 31 and SEQ ID NO: 68; SEQ ID NO: 31 and SEQ ID NO: 69; SEQ ID NO: 32 and SEQ ID NO: 33; SEQ ID NO: 32 and SEQ ID NO: 34; SEQ ID NO: 32 and SEQ ID NO: 35; SEQ ID NO: 32 and SEQ ID NO: 36; SEQ ID NO: 32 and SEQ ID NO: 37; SEQ ID NO: 32 and SEQ ID NO: 38; SEQ ID NO: 32 and SEQ ID NO: 39; SEQ ID NO: 32 and SEQ ID NO: 40; SEQ ID NO: 32 and SEQ ID NO: 41; SEQ ID NO: 32 and SEQ ID NO: 42; SEQ ID NO: 32 and SEQ ID NO: 43; SEQ ID NO: 32 and SEQ ID NO: 44; SEQ ID NO: 32 and SEQ ID NO: 45; SEQ ID NO: 32 and SEQ ID NO: 46; SEQ ID NO: 32 and SEQ ID NO: 47; SEQ ID NO: 32 and SEQ ID NO: 48; SEQ ID NO: 32 and SEQ ID NO: 53; SEQ ID NO: 32 and SEQ ID NO: 54; SEQ ID NO: 32 and SEQ ID NO: 55; SEQ ID NO: 32 and SEQ ID NO: 56; SEQ ID NO: 32 and SEQ ID NO: 57; SEQ ID NO: 32 and SEQ ID NO: 58; SEQ ID NO: 32 and SEQ ID NO: 59; SEQ ID NO: 32 and SEQ ID NO: 60; SEQ ID NO: 32 and SEQ ID NO: 61; SEQ ID NO: 32 and SEQ ID NO: 62; SEQ ID NO: 32 and SEQ ID NO: 63; SEQ ID NO: 32 and SEQ ID NO: 64; SEQ ID NO: 32 and SEQ ID NO: 65; SEQ ID NO: 32 and SEQ ID NO: 66; SEQ ID NO: 32 and SEQ ID NO: 67; SEQ ID NO: 32 and SEQ ID NO: 68; SEQ ID NO: 32 and SEQ ID NO: 69; SEQ ID NO: 33 and SEQ ID NO: 34; SEQ ID NO: 33 and SEQ ID NO: 35; SEQ ID NO: 33 and SEQ ID NO: 36; SEQ ID NO: 33 and SEQ ID NO: 37; SEQ ID NO: 33 and SEQ ID NO: 38; SEQ ID NO: 33 and SEQ ID NO: 39; SEQ ID NO: 33 and SEQ ID NO: 40; SEQ ID NO: 33 and SEQ ID NO: 41; SEQ ID NO: 33 and SEQ ID NO: 42; SEQ ID NO: 33 and SEQ ID NO: 43; SEQ ID NO: 33 and SEQ ID NO: 44; SEQ ID NO: 33 and SEQ ID NO: 45; SEQ ID NO: 33 and SEQ ID NO: 46; SEQ ID NO: 33 and SEQ ID NO: 47; SEQ ID NO: 33 and SEQ ID NO: 48; SEQ ID NO: 33 and SEQ ID NO: 53; SEQ ID NO: 33 and SEQ ID NO: 54; SEQ ID NO: 33 and SEQ ID NO: 55; SEQ ID NO: 33 and SEQ ID NO: 56; SEQ ID NO: 33 and SEQ ID NO: 57; SEQ ID NO: 33 and SEQ ID NO: 58; SEQ ID NO: 33 and SEQ ID NO: 59; SEQ ID NO: 33 and SEQ ID NO: 60; SEQ ID NO: 33 and SEQ ID NO: 61; SEQ ID NO: 33 and SEQ ID NO: 62; SEQ ID NO: 33 and SEQ ID NO: 63; SEQ ID NO: 33 and SEQ ID NO: 64; SEQ ID NO: 33 and SEQ ID NO: 65; SEQ ID NO: 33 and SEQ ID NO: 66; SEQ ID NO: 33 and SEQ ID NO: 67; SEQ ID NO: 33 and SEQ ID NO: 68; SEQ ID NO: 33 and SEQ ID NO: 69; SEQ ID NO: 34 and SEQ ID NO: 35; SEQ ID NO: 34 and SEQ ID NO: 36; SEQ ID NO: 34 and SEQ ID NO: 37; SEQ ID NO: 34 and SEQ ID NO: 38; SEQ ID NO: 34 and SEQ ID NO: 39; SEQ ID NO: 34 and SEQ ID NO: 40; SEQ ID NO: 34 and SEQ ID NO: 41; SEQ ID NO: 34 and SEQ ID NO: 42; SEQ ID NO: 34 and SEQ ID NO: 43; SEQ ID NO: 34 and SEQ ID NO: 44; SEQ ID NO: 34 and SEQ ID NO: 45; SEQ ID NO: 34 and SEQ ID NO: 46; SEQ ID NO: 34 and SEQ ID NO: 47; SEQ ID NO: 34 and SEQ ID NO: 48; SEQ ID NO: 34 and SEQ ID NO: 53; SEQ ID NO: 34 and SEQ ID NO: 54; SEQ ID NO: 34 and SEQ ID NO: 55; SEQ ID NO: 34 and SEQ ID NO: 56; SEQ ID NO: 34 and SEQ ID NO: 57; SEQ ID NO: 34 and SEQ ID NO: 58; SEQ ID NO: 34 and SEQ ID NO: 59; SEQ ID NO: 34 and SEQ ID NO: 60; SEQ ID NO: 34 and SEQ ID NO: 61; SEQ ID NO: 34 and SEQ ID NO: 62; SEQ ID NO: 34 and SEQ ID NO: 63; SEQ ID NO: 34 and SEQ ID NO: 64; SEQ ID NO: 34 and SEQ ID NO: 65; SEQ ID NO: 34 and SEQ ID NO: 66; SEQ ID NO: 34 and SEQ ID NO: 67; SEQ ID NO: 34 and SEQ ID NO: 68; SEQ ID NO: 34 and SEQ ID NO: 69; SEQ ID NO: 35 and SEQ ID NO: 36; SEQ ID NO: 35 and SEQ ID NO: 37; SEQ ID NO: 35 and SEQ ID NO: 38; SEQ ID NO: 35 and SEQ ID NO: 39; SEQ ID NO: 35 and SEQ ID NO: 40; SEQ ID NO: 35 and SEQ ID NO: 41; SEQ ID NO: 35 and SEQ ID NO: 42; SEQ ID NO: 35 and SEQ ID NO: 43; SEQ ID NO: 35 and SEQ ID NO: 44; SEQ ID NO: 35 and SEQ ID NO: 45; SEQ ID NO: 35 and SEQ ID NO: 46; SEQ ID NO: 35 and SEQ ID NO: 47; SEQ ID NO: 35 and SEQ ID NO: 48; SEQ ID NO: 35 and SEQ ID NO: 53; SEQ ID NO: 35 and SEQ ID NO: 54; SEQ ID NO: 35 and SEQ ID NO: 55; SEQ ID NO: 35 and SEQ ID NO: 56; SEQ ID NO: 35 and SEQ ID NO: 57; SEQ ID NO: 35 and SEQ ID NO: 58; SEQ ID NO: 35 and SEQ ID NO: 59; SEQ ID NO: 35 and SEQ ID NO: 60; SEQ ID NO: 35 and SEQ ID NO: 61; SEQ ID NO: 35 and SEQ ID NO: 62; SEQ ID NO: 35 and SEQ ID NO: 63; SEQ ID NO: 35 and SEQ ID NO: 64; SEQ ID NO: 35 and SEQ ID NO: 65; SEQ ID NO: 35 and SEQ ID NO: 66; SEQ ID NO: 35 and SEQ ID NO: 67; SEQ ID NO: 35 and SEQ ID NO: 68; SEQ ID NO: 35 and SEQ ID NO: 69; SEQ ID NO: 36 and SEQ ID NO: 37; SEQ ID NO: 36 and SEQ ID NO: 38; SEQ ID NO: 36 and SEQ ID NO: 39; SEQ ID NO: 36 and SEQ ID NO: 40; SEQ ID NO: 36 and SEQ ID NO: 41; SEQ ID NO: 36 and SEQ ID NO: 42; SEQ ID NO: 36 and SEQ ID NO: 43; SEQ ID NO: 36 and SEQ ID NO: 44; SEQ ID NO: 36 and SEQ ID NO: 45; SEQ ID NO: 36 and SEQ ID NO: 46; SEQ ID NO: 36 and SEQ ID NO: 47; SEQ ID NO: 36 and SEQ ID NO: 48; SEQ ID NO: 36 and SEQ ID NO: 53; SEQ ID NO: 36 and SEQ ID NO: 54; SEQ ID NO: 36 and SEQ ID NO: 55; SEQ ID NO: 36 and SEQ ID NO: 56; SEQ ID NO: 36 and SEQ ID NO: 57; SEQ ID NO: 36 and SEQ ID NO: 58; SEQ ID NO: 36 and SEQ ID NO: 59; SEQ ID NO: 36 and SEQ ID NO: 60; SEQ ID NO: 36 and SEQ ID NO: 61; SEQ ID NO: 36 and SEQ ID NO: 62; SEQ ID NO: 36 and SEQ ID NO: 63; SEQ ID NO: 36 and SEQ ID NO: 64; SEQ ID NO: 36 and SEQ ID NO: 65; SEQ ID NO: 36 and SEQ ID NO: 66; SEQ ID NO: 36 and SEQ ID NO: 67; SEQ ID NO: 36 and SEQ ID NO: 68; SEQ ID NO: 36 and SEQ ID NO: 69; SEQ ID NO: 37 and SEQ ID NO: 38; SEQ ID NO: 37 and SEQ ID NO: 39; SEQ ID NO: 37 and SEQ ID NO: 40; SEQ ID NO: 37 and SEQ ID NO: 41; SEQ ID NO: 37 and SEQ ID NO: 42; SEQ ID NO: 37 and SEQ ID NO: 43; SEQ ID NO: 37 and SEQ ID NO: 44; SEQ ID NO: 37 and SEQ ID NO: 45; SEQ ID NO: 37 and SEQ ID NO: 46; SEQ ID NO: 37 and SEQ ID NO: 47; SEQ ID NO: 37 and SEQ ID NO: 48; SEQ ID NO: 37 and SEQ ID NO: 53; SEQ ID NO: 37 and SEQ ID NO: 54; SEQ ID NO: 37 and SEQ ID NO: 55; SEQ ID NO: 37 and SEQ ID NO: 56; SEQ ID NO: 37 and SEQ ID NO: 57; SEQ ID NO: 37 and SEQ ID NO: 58; SEQ ID NO: 37 and SEQ ID NO: 59; SEQ ID NO: 37 and SEQ ID NO: 60; SEQ ID NO: 37 and SEQ ID NO: 61; SEQ ID NO: 37 and SEQ ID NO: 62; SEQ ID NO: 37 and SEQ ID NO: 63; SEQ ID NO: 37 and SEQ ID NO: 64; SEQ ID NO: 37 and SEQ ID NO: 65; SEQ ID NO: 37 and SEQ ID NO: 66; SEQ ID NO: 37 and SEQ ID NO: 67; SEQ ID NO: 37 and SEQ ID NO: 68; SEQ ID NO: 37 and SEQ ID NO: 69; SEQ ID NO: 38 and SEQ ID NO: 39; SEQ ID NO: 38 and SEQ ID NO: 40; SEQ ID NO: 38 and SEQ ID NO: 41; SEQ ID NO: 38 and SEQ ID NO: 42; SEQ ID NO: 38 and SEQ ID NO: 43; SEQ ID NO: 38 and SEQ ID NO: 44; SEQ ID NO: 38 and SEQ ID NO: 45; SEQ ID NO: 38 and SEQ ID NO: 46; SEQ ID NO: 38 and SEQ ID NO: 47; SEQ ID NO: 38 and SEQ ID NO: 48; SEQ ID NO: 38 and SEQ ID NO: 53; SEQ ID NO: 38 and SEQ ID NO: 54; SEQ ID NO: 38 and SEQ ID NO: 55; SEQ ID NO: 38 and SEQ ID NO: 56; SEQ ID NO: 38 and SEQ ID NO: 57; SEQ ID NO: 38 and SEQ ID NO: 58; SEQ ID NO: 38 and SEQ ID NO: 59; SEQ ID NO: 38 and SEQ ID NO: 60; SEQ ID NO: 38 and SEQ ID NO: 61; SEQ ID NO: 38 and SEQ ID NO: 62; SEQ ID NO: 38 and SEQ ID NO: 63; SEQ ID NO: 38 and SEQ ID NO: 64; SEQ ID NO: 38 and SEQ ID NO: 65; SEQ ID NO: 38 and SEQ ID NO: 66; SEQ ID NO: 38 and SEQ ID NO: 67; SEQ ID NO: 38 and SEQ ID NO: 68; SEQ ID NO: 38 and SEQ ID NO: 69; SEQ ID NO: 39 and SEQ ID NO: 40; SEQ ID NO: 39 and SEQ ID NO: 41; SEQ ID NO: 39 and SEQ ID NO: 42; SEQ ID NO: 39 and SEQ ID NO: 43; SEQ ID NO: 39 and SEQ ID NO: 44; SEQ ID NO: 39 and SEQ ID NO: 45; SEQ ID NO: 39 and SEQ ID NO: 46; SEQ ID NO: 39 and SEQ ID NO: 47; SEQ ID NO: 39 and SEQ ID NO: 48; SEQ ID NO: 39 and SEQ ID NO: 53; SEQ ID NO: 39 and SEQ ID NO: 54; SEQ ID NO: 39 and SEQ ID NO: 55; SEQ ID NO: 39 and SEQ ID NO: 56; SEQ ID NO: 39 and SEQ ID NO: 57; SEQ ID NO: 39 and SEQ ID NO: 58; SEQ ID NO: 39 and SEQ ID NO: 59; SEQ ID NO: 39 and SEQ ID NO: 60; SEQ ID NO: 39 and SEQ ID NO: 61; SEQ ID NO: 39 and SEQ ID NO: 62; SEQ ID NO: 39 and SEQ ID NO: 63; SEQ ID NO: 39 and SEQ ID NO: 64; SEQ ID NO: 39 and SEQ ID NO: 65; SEQ ID NO: 39 and SEQ ID NO: 66; SEQ ID NO: 39 and SEQ ID NO: 67; SEQ ID NO: 39 and SEQ ID NO: 68; SEQ ID NO: 39 and SEQ ID NO: 69; SEQ ID NO: 40 and SEQ ID NO: 41; SEQ ID NO: 40 and SEQ ID NO: 42; SEQ ID NO: 40 and SEQ ID NO: 43; SEQ ID NO: 40 and SEQ ID NO: 44; SEQ ID NO: 40 and SEQ ID NO: 45; SEQ ID NO: 40 and SEQ ID NO: 46; SEQ ID NO: 40 and SEQ ID NO: 47; SEQ ID NO: 40 and SEQ ID NO: 48; SEQ ID NO: 40 and SEQ ID NO: 53; SEQ ID NO: 40 and SEQ ID NO: 54; SEQ ID NO: 40 and SEQ ID NO: 55; SEQ ID NO: 40 and SEQ ID NO: 56; SEQ ID NO: 40 and SEQ ID NO: 57; SEQ ID NO: 40 and SEQ ID NO: 58; SEQ ID NO: 40 and SEQ ID NO: 59; SEQ ID NO: 40 and SEQ ID NO: 60; SEQ ID NO: 40 and SEQ ID NO: 61; SEQ ID NO: 40 and SEQ ID NO: 62; SEQ ID NO: 40 and SEQ ID NO: 63; SEQ ID NO: 40 and SEQ ID NO: 64; SEQ ID NO: 40 and SEQ ID NO: 65; SEQ ID NO: 40 and SEQ ID NO: 66; SEQ ID NO: 40 and SEQ ID NO: 67; SEQ ID NO: 40 and SEQ ID NO: 68; SEQ ID NO: 40 and SEQ ID NO: 69; SEQ ID NO: 41 and SEQ ID NO: 42; SEQ ID NO: 41 and SEQ ID NO: 43; SEQ ID NO: 41 and SEQ ID NO: 44; SEQ ID NO: 41 and SEQ ID NO: 45; SEQ ID NO: 41 and SEQ ID NO: 46; SEQ ID NO: 41 and SEQ ID NO: 47; SEQ ID NO: 41 and SEQ ID NO: 48; SEQ ID NO: 41 and SEQ ID NO: 53; SEQ ID NO: 41 and SEQ ID NO: 54; SEQ ID NO: 41 and SEQ ID NO: 55; SEQ ID NO: 41 and SEQ ID NO: 56; SEQ ID NO: 41 and SEQ ID NO: 57; SEQ ID NO: 41 and SEQ ID NO: 58; SEQ ID NO: 41 and SEQ ID NO: 59; SEQ ID NO: 41 and SEQ ID NO: 60; SEQ ID NO: 41 and SEQ ID NO: 61; SEQ ID NO: 41 and SEQ ID NO: 62; SEQ ID NO: 41 and SEQ ID NO: 63; SEQ ID NO: 41 and SEQ ID NO: 64; SEQ ID NO: 41 and SEQ ID NO: 65; SEQ ID NO: 41 and SEQ ID NO: 66; SEQ ID NO: 41 and SEQ ID NO: 67; SEQ ID NO: 41 and SEQ ID NO: 68; SEQ ID NO: 41 and SEQ ID NO: 69; SEQ ID NO: 42 and SEQ ID NO: 43; SEQ ID NO: 42 and SEQ ID NO: 44; SEQ ID NO: 42 and SEQ ID NO: 45; SEQ ID NO: 42 and SEQ ID NO: 46; SEQ ID NO: 42 and SEQ ID NO: 47; SEQ ID NO: 42 and SEQ ID NO: 48; SEQ ID NO: 42 and SEQ ID NO: 53; SEQ ID NO: 42 and SEQ ID NO: 54; SEQ ID NO: 42 and SEQ ID NO: 55; SEQ ID NO: 42 and SEQ ID NO: 56; SEQ ID NO: 42 and SEQ ID NO: 57; SEQ ID NO: 42 and SEQ ID NO: 58; SEQ ID NO: 42 and SEQ ID NO: 59; SEQ ID NO: 42 and SEQ ID NO: 60; SEQ ID NO: 42 and SEQ ID NO: 61; SEQ ID NO: 42 and SEQ ID NO: 62; SEQ ID NO: 42 and SEQ ID NO: 63; SEQ ID NO: 42 and SEQ ID NO: 64; SEQ ID NO: 42 and SEQ ID NO: 65; SEQ ID NO: 42 and SEQ ID NO: 66; SEQ ID NO: 42 and SEQ ID NO: 67; SEQ ID NO: 42 and SEQ ID NO: 68; SEQ ID NO: 42 and SEQ ID NO: 69; SEQ ID NO: 43 and SEQ ID NO: 44; SEQ ID NO: 43 and SEQ ID NO: 45; SEQ ID NO: 43 and SEQ ID NO: 46; SEQ ID NO: 43 and SEQ ID NO: 47; SEQ ID NO: 43 and SEQ ID NO: 48; SEQ ID NO: 43 and SEQ ID NO: 53; SEQ ID NO: 43 and SEQ ID NO: 54; SEQ ID NO: 43 and SEQ ID NO: 55; SEQ ID NO: 43 and SEQ ID NO: 56; SEQ ID NO: 43 and SEQ ID NO: 57; SEQ ID NO: 43 and SEQ ID NO: 58; SEQ ID NO: 43 and SEQ ID NO: 59; SEQ ID NO: 43 and SEQ ID NO: 60; SEQ ID NO: 43 and SEQ ID NO: 61; SEQ ID NO: 43 and SEQ ID NO: 62; SEQ ID NO: 43 and SEQ ID NO: 63; SEQ ID NO: 43 and SEQ ID NO: 64; SEQ ID NO: 43 and SEQ ID NO: 65; SEQ ID NO: 43 and SEQ ID NO: 66; SEQ ID NO: 43 and SEQ ID NO: 67; SEQ ID NO: 43 and SEQ ID NO: 68; SEQ ID NO: 43 and SEQ ID NO: 69; SEQ ID NO: 44 and SEQ ID NO: 45; SEQ ID NO: 44 and SEQ ID NO: 46; SEQ ID NO: 44 and SEQ ID NO: 47; SEQ ID NO: 44 and SEQ ID NO: 48; SEQ ID NO: 44 and SEQ ID NO: 53; SEQ ID NO: 44 and SEQ ID NO: 54; SEQ ID NO: 44 and SEQ ID NO: 55; SEQ ID NO: 44 and SEQ ID NO: 56; SEQ ID NO: 44 and SEQ ID NO: 57; SEQ ID NO: 44 and SEQ ID NO: 58; SEQ ID NO: 44 and SEQ ID NO: 59; SEQ ID NO: 44 and SEQ ID NO: 60; SEQ ID NO: 44 and SEQ ID NO: 61; SEQ ID NO: 44 and SEQ ID NO: 62; SEQ ID NO: 44 and SEQ ID NO: 63; SEQ ID NO: 44 and SEQ ID NO: 64; SEQ ID NO: 44 and SEQ ID NO: 65; SEQ ID NO: 44 and SEQ ID NO: 66; SEQ ID NO: 44 and SEQ ID NO: 67; SEQ ID NO: 44 and SEQ ID NO: 68; SEQ ID NO: 44 and SEQ ID NO: 69; SEQ ID NO: 45 and SEQ ID NO: 46; SEQ ID NO: 45 and SEQ ID NO: 47; SEQ ID NO: 45 and SEQ ID NO: 48; SEQ ID NO: 45 and SEQ ID NO: 53; SEQ ID NO: 45 and SEQ ID NO: 54; SEQ ID NO: 45 and SEQ ID NO: 55; SEQ ID NO: 45 and SEQ ID NO: 56; SEQ ID NO: 45 and SEQ ID NO: 57; SEQ ID NO: 45 and SEQ ID NO: 58; SEQ ID NO: 45 and SEQ ID NO: 59; SEQ ID NO: 45 and SEQ ID NO: 60; SEQ ID NO: 45 and SEQ ID NO: 61; SEQ ID NO: 45 and SEQ ID NO: 62; SEQ ID NO: 45 and SEQ ID NO: 63; SEQ ID NO: 45 and SEQ ID NO: 64; SEQ ID NO: 45 and SEQ ID NO: 65; SEQ ID NO: 45 and SEQ ID NO: 66; SEQ ID NO: 45 and SEQ ID NO: 67; SEQ ID NO: 45 and SEQ ID NO: 68; SEQ ID NO: 45 and SEQ ID NO: 69; SEQ ID NO: 46 and SEQ ID NO: 47; SEQ ID NO: 46 and SEQ ID NO: 48; SEQ ID NO: 46 and SEQ ID NO: 53; SEQ ID NO: 46 and SEQ ID NO: 54; SEQ ID NO: 46 and SEQ ID NO: 55; SEQ ID NO: 46 and SEQ ID NO: 56; SEQ ID NO: 46 and SEQ ID NO: 57; SEQ ID NO: 46 and SEQ ID NO: 58; SEQ ID NO: 46 and SEQ ID NO: 59; SEQ ID NO: 46 and SEQ ID NO: 60; SEQ ID NO: 46 and SEQ ID NO: 61; SEQ ID NO: 46 and SEQ ID NO: 62; SEQ ID NO: 46 and SEQ ID NO: 63; SEQ ID NO: 46 and SEQ ID NO: 64; SEQ ID NO: 46 and SEQ ID NO: 65; SEQ ID NO: 46 and SEQ ID NO: 66; SEQ ID NO: 46 and SEQ ID NO: 67; SEQ ID NO: 46 and SEQ ID NO: 68; SEQ ID NO: 46 and SEQ ID NO: 69; SEQ ID NO: 47 and SEQ ID NO: 48; SEQ ID NO: 47 and SEQ ID NO: 53; SEQ ID NO: 47 and SEQ ID NO: 54; SEQ ID NO: 47 and SEQ ID NO: 55; SEQ ID NO: 47 and SEQ ID NO: 56; SEQ ID NO: 47 and SEQ ID NO: 57; SEQ ID NO: 47 and SEQ ID NO: 58; SEQ ID NO: 47 and SEQ ID NO: 59; SEQ ID NO: 47 and SEQ ID NO: 60; SEQ ID NO: 47 and SEQ ID NO: 61; SEQ ID NO: 47 and SEQ ID NO: 62; SEQ ID NO: 47 and SEQ ID NO: 63; SEQ ID NO: 47 and SEQ ID NO: 64; SEQ ID NO: 47 and SEQ ID NO: 65; SEQ ID NO: 47 and SEQ ID NO: 66; SEQ ID NO: 47 and SEQ ID NO: 67; SEQ ID NO: 47 and SEQ ID NO: 68; SEQ ID NO: 47 and SEQ ID NO: 69; SEQ ID NO: 48 and SEQ ID NO: 53; SEQ ID NO: 48 and SEQ ID NO: 54; SEQ ID NO: 48 and SEQ ID NO: 55; SEQ ID NO: 48 and SEQ ID NO: 56; SEQ ID NO: 48 and SEQ ID NO: 57; SEQ ID NO: 48 and SEQ ID NO: 58; SEQ ID NO: 48 and SEQ ID NO: 59; SEQ ID NO: 48 and SEQ ID NO: 60; SEQ ID NO: 48 and SEQ ID NO: 61; SEQ ID NO: 48 and SEQ ID NO: 62; SEQ ID NO: 48 and SEQ ID NO: 63; SEQ ID NO: 48 and SEQ ID NO: 64; SEQ ID NO: 48 and SEQ ID NO: 65; SEQ ID NO: 48 and SEQ ID NO: 66; SEQ ID NO: 48 and SEQ ID NO: 67; SEQ ID NO: 48 and SEQ ID NO: 68; SEQ ID NO: 48 and SEQ ID NO: 69; SEQ ID NO: 53 and SEQ ID NO: 54; SEQ ID NO: 53 and SEQ ID NO: 55; SEQ ID NO: 53 and SEQ ID NO: 56; SEQ ID NO: 53 and SEQ ID NO: 57; SEQ ID NO: 53 and SEQ ID NO: 58; SEQ ID NO: 53 and SEQ ID NO: 59; SEQ ID NO: 53 and SEQ ID NO: 60; SEQ ID NO: 53 and SEQ ID NO: 61; SEQ ID NO: 53 and SEQ ID NO: 62; SEQ ID NO: 53 and SEQ ID NO: 63; SEQ ID NO: 53 and SEQ ID NO: 64; SEQ ID NO: 53 and SEQ ID NO: 65; SEQ ID NO: 53 and SEQ ID NO: 66; SEQ ID NO: 53 and SEQ ID NO: 67; SEQ ID NO: 53 and SEQ ID NO: 68; SEQ ID NO: 53 and SEQ ID NO: 69; SEQ ID NO: 54 and SEQ ID NO: 55; SEQ ID NO: 54 and SEQ ID NO: 56; SEQ ID NO: 54 and SEQ ID NO: 57; SEQ ID NO: 54 and SEQ ID NO: 58; SEQ ID NO: 54 and SEQ ID NO: 59; SEQ ID NO: 54 and SEQ ID NO: 60; SEQ ID NO: 54 and SEQ ID NO: 61; SEQ ID NO: 54 and SEQ ID NO: 62; SEQ ID NO: 54 and SEQ ID NO: 63; SEQ ID NO: 54 and SEQ ID NO: 64; SEQ ID NO: 54 and SEQ ID NO: 65; SEQ ID NO: 54 and SEQ ID NO: 66; SEQ ID NO: 54 and SEQ ID NO: 67; SEQ ID NO: 54 and SEQ ID NO: 68; SEQ ID NO: 54 and SEQ ID NO: 69; SEQ ID NO: 55 and SEQ ID NO: 56; SEQ ID NO: 55 and SEQ ID NO: 57; SEQ ID NO: 55 and SEQ ID NO: 58; SEQ ID NO: 55 and SEQ ID NO: 59; SEQ ID NO: 55 and SEQ ID NO: 60; SEQ ID NO: 55 and SEQ ID NO: 61; SEQ ID NO: 55 and SEQ ID NO: 62; SEQ ID NO: 55 and SEQ ID NO: 63; SEQ ID NO: 55 and SEQ ID NO: 64; SEQ ID NO: 55 and SEQ ID NO: 65; SEQ ID NO: 55 and SEQ ID NO: 66; SEQ ID NO: 55 and SEQ ID NO: 67; SEQ ID NO: 55 and SEQ ID NO: 68; SEQ ID NO: 55 and SEQ ID NO: 69; SEQ ID NO: 56 and SEQ ID NO: 57; SEQ ID NO: 56 and SEQ ID NO: 58; SEQ ID NO: 56 and SEQ ID NO: 59; SEQ ID NO: 56 and SEQ ID NO: 60; SEQ ID NO: 56 and SEQ ID NO: 61; SEQ ID NO: 56 and SEQ ID NO: 62; SEQ ID NO: 56 and SEQ ID NO: 63; SEQ ID NO: 56 and SEQ ID NO: 64; SEQ ID NO: 56 and SEQ ID NO: 65; SEQ ID NO: 56 and SEQ ID NO: 66; SEQ ID NO: 56 and SEQ ID NO: 67; SEQ ID NO: 56 and SEQ ID NO: 68; SEQ ID NO: 56 and SEQ ID NO: 69; SEQ ID NO: 57 and SEQ ID NO: 58; SEQ ID NO: 57 and SEQ ID NO: 59; SEQ ID NO: 57 and SEQ ID NO: 60; SEQ ID NO: 57 and SEQ ID NO: 61; SEQ ID NO: 57 and SEQ ID NO: 62; SEQ ID NO: 57 and SEQ ID NO: 63; SEQ ID NO: 57 and SEQ ID NO: 64; SEQ ID NO: 57 and SEQ ID NO: 65; SEQ ID NO: 57 and SEQ ID NO: 66; SEQ ID NO: 57 and SEQ ID NO: 67; SEQ ID NO: 57 and SEQ ID NO: 68; SEQ ID NO: 57 and SEQ ID NO: 69; SEQ ID NO: 58 and SEQ ID NO: 59; SEQ ID NO: 58 and SEQ ID NO: 60; SEQ ID NO: 58 and SEQ ID NO: 61; SEQ ID NO: 58 and SEQ ID NO: 62; SEQ ID NO: 58 and SEQ ID NO: 63; SEQ ID NO: 58 and SEQ ID NO: 64; SEQ ID NO: 58 and SEQ ID NO: 65; SEQ ID NO: 58 and SEQ ID NO: 66; SEQ ID NO: 58 and SEQ ID NO: 67; SEQ ID NO: 58 and SEQ ID NO: 68; SEQ ID NO: 58 and SEQ ID NO: 69; SEQ ID NO: 59 and SEQ ID NO: 60; SEQ ID NO: 59 and SEQ ID NO: 61; SEQ ID NO: 59 and SEQ ID NO: 62; SEQ ID NO: 59 and SEQ ID NO: 63; SEQ ID NO: 59 and SEQ ID NO: 64; SEQ ID NO: 59 and SEQ ID NO: 65; SEQ ID NO: 59 and SEQ ID NO: 66; SEQ ID NO: 59 and SEQ ID NO: 67; SEQ ID NO: 59 and SEQ ID NO: 68; SEQ ID NO: 59 and SEQ ID NO: 69; SEQ ID NO: 60 and SEQ ID NO: 61; SEQ ID NO: 60 and SEQ ID NO: 62; SEQ ID NO: 60 and SEQ ID NO: 63; SEQ ID NO: 60 and SEQ ID NO: 64; SEQ ID NO: 60 and SEQ ID NO: 65; SEQ ID NO: 60 and SEQ ID NO: 66; SEQ ID NO: 60 and SEQ ID NO: 67; SEQ ID NO: 60 and SEQ ID NO: 68; SEQ ID NO: 60 and SEQ ID NO: 69; SEQ ID NO: 61 and SEQ ID NO: 62; SEQ ID NO: 61 and SEQ ID NO: 63; SEQ ID NO: 61 and SEQ ID NO: 64; SEQ ID NO: 61 and SEQ ID NO: 65; SEQ ID NO: 61 and SEQ ID NO: 66; SEQ ID NO: 61 and SEQ ID NO: 67; SEQ ID NO: 61 and SEQ ID NO: 68; SEQ ID NO: 61 and SEQ ID NO: 69; SEQ ID NO: 62 and SEQ ID NO: 63; SEQ ID NO: 62 and SEQ ID NO: 64; SEQ ID NO: 62 and SEQ ID NO: 65; SEQ ID NO: 62 and SEQ ID NO: 66; SEQ ID NO: 62 and SEQ ID NO: 67; SEQ ID NO: 62 and SEQ ID NO: 68; SEQ ID NO: 62 and SEQ ID NO: 69; SEQ ID NO: 63 and SEQ ID NO: 64; SEQ ID NO: 63 and SEQ ID NO: 65; SEQ ID NO: 63 and SEQ ID NO: 66; SEQ ID NO: 63 and SEQ ID NO: 67; SEQ ID NO: 63 and SEQ ID NO: 68; SEQ ID NO: 63 and SEQ ID NO: 69; SEQ ID NO: 64 and SEQ ID NO: 65; SEQ ID NO: 64 and SEQ ID NO: 66; SEQ ID NO: 64 and SEQ ID NO: 67; SEQ ID NO: 64 and SEQ ID NO: 68; SEQ ID NO: 64 and SEQ ID NO: 69; SEQ ID NO: 65 and SEQ ID NO: 66; SEQ ID NO: 65 and SEQ ID NO: 67; SEQ ID NO: 65 and SEQ ID NO: 68; SEQ ID NO: 65 and SEQ ID NO: 69; SEQ ID NO: 66 and SEQ ID NO: 67; SEQ ID NO: 66 and SEQ ID NO: 68; SEQ ID NO: 66 and SEQ ID NO: 69; SEQ ID NO: 67 and SEQ ID NO: 68; SEQ ID NO: 67 and SEQ ID NO: 69; SEQ ID NO: 68 and SEQ ID NO: 69; and
[0305] d. SEQ ID NO: 243 and SEQ ID NO: 244; SEQ ID NO: 243 and SEQ ID NO: 245; SEQ ID NO: 243 and SEQ ID NO: 246; SEQ ID NO: 243 and SEQ ID NO: 247; SEQ ID NO: 243 and SEQ ID NO: 248; SEQ ID NO: 243 and SEQ ID NO: 249; SEQ ID NO: 243 and SEQ ID NO: 250; SEQ ID NO: 243 and SEQ ID NO: 251; SEQ ID NO: 243 and SEQ ID NO: 252; SEQ ID NO: 243 and SEQ ID NO: 253; SEQ ID NO: 243 and SEQ ID NO: 254; SEQ ID NO: 243 and SEQ ID NO: 255; SEQ ID NO: 243 and SEQ ID NO: 256; SEQ ID NO: 243 and SEQ ID NO: 257; SEQ ID NO: 243 and SEQ ID NO: 258; SEQ ID NO: 243 and SEQ ID NO: 259; SEQ ID NO: 243 and SEQ ID NO: 260; SEQ ID NO: 243 and SEQ ID NO: 261; SEQ ID NO: 243 and SEQ ID NO: 262; SEQ ID NO: 243 and SEQ ID NO: 263; SEQ ID NO: 243 and SEQ ID NO: 264; SEQ ID NO: 243 and SEQ ID NO: 265; SEQ ID NO: 243 and SEQ ID NO: 266; SEQ ID NO: 243 and SEQ ID NO: 267; SEQ ID NO: 243 and SEQ ID NO: 268; SEQ ID NO: 243 and SEQ ID NO: 269; SEQ ID NO: 244 and SEQ ID NO: 245; SEQ ID NO: 244 and SEQ ID NO: 246; SEQ ID NO: 244 and SEQ ID NO: 247; SEQ ID NO: 244 and SEQ ID NO: 248; SEQ ID NO: 244 and SEQ ID NO: 249; SEQ ID NO: 244 and SEQ ID NO: 250; SEQ ID NO: 244 and SEQ ID NO: 251; SEQ ID NO: 244 and SEQ ID NO: 252; SEQ ID NO: 244 and SEQ ID NO: 253; SEQ ID NO: 244 and SEQ ID NO: 254; SEQ ID NO: 244 and SEQ ID NO: 255; SEQ ID NO: 244 and SEQ ID NO: 256; SEQ ID NO: 244 and SEQ ID NO: 257; SEQ ID NO: 244 and SEQ ID NO: 258; SEQ ID NO: 244 and SEQ ID NO: 259; SEQ ID NO: 244 and SEQ ID NO: 260; SEQ ID NO: 244 and SEQ ID NO: 261; SEQ ID NO: 244 and SEQ ID NO: 262; SEQ ID NO: 244 and SEQ ID NO: 263; SEQ ID NO: 244 and SEQ ID NO: 264; SEQ ID NO: 244 and SEQ ID NO: 265; SEQ ID NO: 244 and SEQ ID NO: 266; SEQ ID NO: 244 and SEQ ID NO: 267; SEQ ID NO: 244 and SEQ ID NO: 268; SEQ ID NO: 244 and SEQ ID NO: 269; SEQ ID NO: 245 and SEQ ID NO: 246; SEQ ID NO: 245 and SEQ ID NO: 247; SEQ ID NO: 245 and SEQ ID NO: 248; SEQ ID NO: 245 and SEQ ID NO: 249; SEQ ID NO: 245 and SEQ ID NO: 250; SEQ ID NO: 245 and SEQ ID NO: 251; SEQ ID NO: 245 and SEQ ID NO: 252; SEQ ID NO: 245 and SEQ ID NO: 253; SEQ ID NO: 245 and SEQ ID NO: 254; SEQ ID NO: 245 and SEQ ID NO: 255; SEQ ID NO: 245 and SEQ ID NO: 256; SEQ ID NO: 245 and SEQ ID NO: 257; SEQ ID NO: 245 and SEQ ID NO: 258; SEQ ID NO: 245 and SEQ ID NO: 259; SEQ ID NO: 245 and SEQ ID NO: 260; SEQ ID NO: 245 and SEQ ID NO: 261; SEQ ID NO: 245 and SEQ ID NO: 262; SEQ ID NO: 245 and SEQ ID NO: 263; SEQ ID NO: 245 and SEQ ID NO: 264; SEQ ID NO: 245 and SEQ ID NO: 265; SEQ ID NO: 245 and SEQ ID NO: 266; SEQ ID NO: 245 and SEQ ID NO: 267; SEQ ID NO: 245 and SEQ ID NO: 268; SEQ ID NO: 245 and SEQ ID NO: 269; SEQ ID NO: 246 and SEQ ID NO: 247; SEQ ID NO: 246 and SEQ ID NO: 248; SEQ ID NO: 246 and SEQ ID NO: 249; SEQ ID NO: 246 and SEQ ID NO: 250; SEQ ID NO: 246 and SEQ ID NO: 251; SEQ ID NO: 246 and SEQ ID NO: 252; SEQ ID NO: 246 and SEQ ID NO: 253; SEQ ID NO: 246 and SEQ ID NO: 254; SEQ ID NO: 246 and SEQ ID NO: 255; SEQ ID NO: 246 and SEQ ID NO: 256; SEQ ID NO: 246 and SEQ ID NO: 257; SEQ ID NO: 246 and SEQ ID NO: 258; SEQ ID NO: 246 and SEQ ID NO: 259; SEQ ID NO: 246 and SEQ ID NO: 260; SEQ ID NO: 246 and SEQ ID NO: 261; SEQ ID NO: 246 and SEQ ID NO: 262; SEQ ID NO: 246 and SEQ ID NO: 263; SEQ ID NO: 246 and SEQ ID NO: 264; SEQ ID NO: 246 and SEQ ID NO: 265; SEQ ID NO: 246 and SEQ ID NO: 266; SEQ ID NO: 246 and SEQ ID NO: 267; SEQ ID NO: 246 and SEQ ID NO: 268; SEQ ID NO: 246 and SEQ ID NO: 269; SEQ ID NO: 247 and SEQ ID NO: 248; SEQ ID NO: 247 and SEQ ID NO: 249; SEQ ID NO: 247 and SEQ ID NO: 250; SEQ ID NO: 247 and SEQ ID NO: 251; SEQ ID NO: 247 and SEQ ID NO: 252; SEQ ID NO: 247 and SEQ ID NO: 253; SEQ ID NO: 247 and SEQ ID NO: 254; SEQ ID NO: 247 and SEQ ID NO: 255; SEQ ID NO: 247 and SEQ ID NO: 256; SEQ ID NO: 247 and SEQ ID NO: 257; SEQ ID NO: 247 and SEQ ID NO: 258; SEQ ID NO: 247 and SEQ ID NO: 259; SEQ ID NO: 247 and SEQ ID NO: 260; SEQ ID NO: 247 and SEQ ID NO: 261; SEQ ID NO: 247 and SEQ ID NO: 262; SEQ ID NO: 247 and SEQ ID NO: 263; SEQ ID NO: 247 and SEQ ID NO: 264; SEQ ID NO: 247 and SEQ ID NO: 265; SEQ ID NO: 247 and SEQ ID NO: 266; SEQ ID NO: 247 and SEQ ID NO: 267; SEQ ID NO: 247 and SEQ ID NO: 268; SEQ ID NO: 247 and SEQ ID NO: 269; SEQ ID NO: 248 and SEQ ID NO: 249; SEQ ID NO: 248 and SEQ ID NO: 250; SEQ ID NO: 248 and SEQ ID NO: 251; SEQ ID NO: 248 and SEQ ID NO: 252; SEQ ID NO: 248 and SEQ ID NO: 253; SEQ ID NO: 248 and SEQ ID NO: 254; SEQ ID NO: 248 and SEQ ID NO: 255; SEQ ID NO: 248 and SEQ ID NO: 256; SEQ ID NO: 248 and SEQ ID NO: 257; SEQ ID NO: 248 and SEQ ID NO: 258; SEQ ID NO: 248 and SEQ ID NO: 259; SEQ ID NO: 248 and SEQ ID NO: 260; SEQ ID NO: 248 and SEQ ID NO: 261; SEQ ID NO: 248 and SEQ ID NO: 262; SEQ ID NO: 248 and SEQ ID NO: 263; SEQ ID NO: 248 and SEQ ID NO: 264; SEQ ID NO: 248 and SEQ ID NO: 265; SEQ ID NO: 248 and SEQ ID NO: 266; SEQ ID NO: 248 and SEQ ID NO: 267; SEQ ID NO: 248 and SEQ ID NO: 268; SEQ ID NO: 248 and SEQ ID NO: 269; SEQ ID NO: 249 and SEQ ID NO: 250; SEQ ID NO: 249 and SEQ ID NO: 251; SEQ ID NO: 249 and SEQ ID NO: 252; SEQ ID NO: 249 and SEQ ID NO: 253; SEQ ID NO: 249 and SEQ ID NO: 254; SEQ ID NO: 249 and SEQ ID NO: 255; SEQ ID NO: 249 and SEQ ID NO: 256; SEQ ID NO: 249 and SEQ ID NO: 257; SEQ ID NO: 249 and SEQ ID NO: 258; SEQ ID NO: 249 and SEQ ID NO: 259; SEQ ID NO: 249 and SEQ ID NO: 260; SEQ ID NO: 249 and SEQ ID NO: 261; SEQ ID NO: 249 and SEQ ID NO: 262; SEQ ID NO: 249 and SEQ ID NO: 263; SEQ ID NO: 249 and SEQ ID NO: 264; SEQ ID NO: 249 and SEQ ID NO: 265; SEQ ID NO: 249 and SEQ ID NO: 266; SEQ ID NO: 249 and SEQ ID NO: 267; SEQ ID NO: 249 and SEQ ID NO: 268; SEQ ID NO: 249 and SEQ ID NO: 269; SEQ ID NO: 250 and SEQ ID NO: 251; SEQ ID NO: 250 and SEQ ID NO: 252; SEQ ID NO: 250 and SEQ ID NO: 253; SEQ ID NO: 250 and SEQ ID NO: 254; SEQ ID NO: 250 and SEQ ID NO: 255; SEQ ID NO: 250 and SEQ ID NO: 256; SEQ ID NO: 250 and SEQ ID NO: 257; SEQ ID NO: 250 and SEQ ID NO: 258; SEQ ID NO: 250 and SEQ ID NO: 259; SEQ ID NO: 250 and SEQ ID NO: 260; SEQ ID NO: 250 and SEQ ID NO: 261; SEQ ID NO: 250 and SEQ ID NO: 262; SEQ ID NO: 250 and SEQ ID NO: 263; SEQ ID NO: 250 and SEQ ID NO: 264; SEQ ID NO: 250 and SEQ ID NO: 265; SEQ ID NO: 250 and SEQ ID NO: 266; SEQ ID NO: 250 and SEQ ID NO: 267; SEQ ID NO: 250 and SEQ ID NO: 268; SEQ ID NO: 250 and SEQ ID NO: 269; SEQ ID NO: 251 and SEQ ID NO: 252; SEQ ID NO: 251 and SEQ ID NO: 253; SEQ ID NO: 251 and SEQ ID NO: 254; SEQ ID NO: 251 and SEQ ID NO: 255; SEQ ID NO: 251 and SEQ ID NO: 256; SEQ ID NO: 251 and SEQ ID NO: 257; SEQ ID NO: 251 and SEQ ID NO: 258; SEQ ID NO: 251 and SEQ ID NO: 259; SEQ ID NO: 251 and SEQ ID NO: 260; SEQ ID NO: 251 and SEQ ID NO: 261; SEQ ID NO: 251 and SEQ ID NO: 262; SEQ ID NO: 251 and SEQ ID NO: 263; SEQ ID NO: 251 and SEQ ID NO: 264; SEQ ID NO: 251 and SEQ ID NO: 265; SEQ ID NO: 251 and SEQ ID NO: 266; SEQ ID NO: 251 and SEQ ID NO: 267; SEQ ID NO: 251 and SEQ ID NO: 268; SEQ ID NO: 251 and SEQ ID NO: 269; SEQ ID NO: 252 and SEQ ID NO: 253; SEQ ID NO: 252 and SEQ ID NO: 254; SEQ ID NO: 252 and SEQ ID NO: 255; SEQ ID NO: 252 and SEQ ID NO: 256; SEQ ID NO: 252 and SEQ ID NO: 257; SEQ ID NO: 252 and SEQ ID NO: 258; SEQ ID NO: 252 and SEQ ID NO: 259; SEQ ID NO: 252 and SEQ ID NO: 260; SEQ ID NO: 252 and SEQ ID NO: 261; SEQ ID NO: 252 and SEQ ID NO: 262; SEQ ID NO: 252 and SEQ ID NO: 263; SEQ ID NO: 252 and SEQ ID NO: 264; SEQ ID NO: 252 and SEQ ID NO: 265; SEQ ID NO: 252 and SEQ ID NO: 266; SEQ ID NO: 252 and SEQ ID NO: 267; SEQ ID NO: 252 and SEQ ID NO: 268; SEQ ID NO: 252 and SEQ ID NO: 269; SEQ ID NO: 253 and SEQ ID NO: 254; SEQ ID NO: 253 and SEQ ID NO: 255; SEQ ID NO: 253 and SEQ ID NO: 256; SEQ ID NO: 253 and SEQ ID NO: 257; SEQ ID NO: 253 and SEQ ID NO: 258; SEQ ID NO: 253 and SEQ ID NO: 259; SEQ ID NO: 253 and SEQ ID NO: 260; SEQ ID NO: 253 and SEQ ID NO: 261; SEQ ID NO: 253 and SEQ ID NO: 262; SEQ ID NO: 253 and SEQ ID NO: 263; SEQ ID NO: 253 and SEQ ID NO: 264; SEQ ID NO: 253 and SEQ ID NO: 265; SEQ ID NO: 253 and SEQ ID NO: 266; SEQ ID NO: 253 and SEQ ID NO: 267; SEQ ID NO: 253 and SEQ ID NO: 268; SEQ ID NO: 253 and SEQ ID NO: 269; SEQ ID NO: 254 and SEQ ID NO: 255; SEQ ID NO: 254 and SEQ ID NO: 256; SEQ ID NO: 254 and SEQ ID NO: 257; SEQ ID NO: 254 and SEQ ID NO: 258; SEQ ID NO: 254 and SEQ ID NO: 259; SEQ ID NO: 254 and SEQ ID NO: 260; SEQ ID NO: 254 and SEQ ID NO: 261; SEQ ID NO: 254 and SEQ ID NO: 262; SEQ ID NO: 254 and SEQ ID NO: 263; SEQ ID NO: 254 and SEQ ID NO: 264; SEQ ID NO: 254 and SEQ ID NO: 265; SEQ ID NO: 254 and SEQ ID NO: 266; SEQ ID NO: 254 and SEQ ID NO: 267; SEQ ID NO: 254 and SEQ ID NO: 268; SEQ ID NO: 254 and SEQ ID NO: 269; SEQ ID NO: 255 and SEQ ID NO: 256; SEQ ID NO: 255 and SEQ ID NO: 257; SEQ ID NO: 255 and SEQ ID NO: 258; SEQ ID NO: 255 and SEQ ID NO: 259; SEQ ID NO: 255 and SEQ ID NO: 260; SEQ ID NO: 255 and SEQ ID NO: 261; SEQ ID NO: 255 and SEQ ID NO: 262; SEQ ID NO: 255 and SEQ ID NO: 263; SEQ ID NO: 255 and SEQ ID NO: 264; SEQ ID NO: 255 and SEQ ID NO: 265; SEQ ID NO: 255 and SEQ ID NO: 266; SEQ ID NO: 255 and SEQ ID NO: 267; SEQ ID NO: 255 and SEQ ID NO: 268; SEQ ID NO: 255 and SEQ ID NO: 269; SEQ ID NO: 256 and SEQ ID NO: 257; SEQ ID NO: 256 and SEQ ID NO: 258; SEQ ID NO: 256 and SEQ ID NO: 259; SEQ ID NO: 256 and SEQ ID NO: 260; SEQ ID NO: 256 and SEQ ID NO: 261; SEQ ID NO: 256 and SEQ ID NO: 262; SEQ ID NO: 256 and SEQ ID NO: 263; SEQ ID NO: 256 and SEQ ID NO: 264; SEQ ID NO: 256 and SEQ ID NO: 265; SEQ ID NO: 256 and SEQ ID NO: 266; SEQ ID NO: 256 and SEQ ID NO: 267; SEQ ID NO: 256 and SEQ ID NO: 268; SEQ ID NO: 256 and SEQ ID NO: 269; SEQ ID NO: 257 and SEQ ID NO: 258; SEQ ID NO: 257 and SEQ ID NO: 259; SEQ ID NO: 257 and SEQ ID NO: 260; SEQ ID NO: 257 and SEQ ID NO: 261; SEQ ID NO: 257 and SEQ ID NO: 262; SEQ ID NO: 257 and SEQ ID NO: 263; SEQ ID NO: 257 and SEQ ID NO: 264; SEQ ID NO: 257 and SEQ ID NO: 265; SEQ ID NO: 257 and SEQ ID NO: 266; SEQ ID NO: 257 and SEQ ID NO: 267; SEQ ID NO: 257 and SEQ ID NO: 268; SEQ ID NO: 257 and SEQ ID NO: 269; SEQ ID NO: 258 and SEQ ID NO: 259; SEQ ID NO: 258 and SEQ ID NO: 260; SEQ ID NO: 258 and SEQ ID NO: 261; SEQ ID NO: 258 and SEQ ID NO: 262; SEQ ID NO: 258 and SEQ ID NO: 263; SEQ ID NO: 258 and SEQ ID NO: 264; SEQ ID NO: 258 and SEQ ID NO: 265; SEQ ID NO: 258 and SEQ ID NO: 266; SEQ ID NO: 258 and SEQ ID NO: 267; SEQ ID NO: 258 and SEQ ID NO: 268; SEQ ID NO: 258 and SEQ ID NO: 269; SEQ ID NO: 259 and SEQ ID NO: 260; SEQ ID NO: 259 and SEQ ID NO: 261; SEQ ID NO: 259 and SEQ ID NO: 262; SEQ ID NO: 259 and SEQ ID NO: 263; SEQ ID NO: 259 and SEQ ID NO: 264; SEQ ID NO: 259 and SEQ ID NO: 265; SEQ ID NO: 259 and SEQ ID NO: 266; SEQ ID NO: 259 and SEQ ID NO: 267; SEQ ID NO: 259 and SEQ ID NO: 268; SEQ ID NO: 259 and SEQ ID NO: 269; SEQ ID NO: 260 and SEQ ID NO: 261; SEQ ID NO: 260 and SEQ ID NO: 262; SEQ ID NO: 260 and SEQ ID NO: 263; SEQ ID NO: 260 and SEQ ID NO: 264; SEQ ID NO: 260 and SEQ ID NO: 265; SEQ ID NO: 260 and SEQ ID NO: 266; SEQ ID NO: 260 and SEQ ID NO: 267; SEQ ID NO: 260 and SEQ ID NO: 268; SEQ ID NO: 260 and SEQ ID NO: 269; SEQ ID NO: 261 and SEQ ID NO: 262; SEQ ID NO: 261 and SEQ ID NO: 263; SEQ ID NO: 261 and SEQ ID NO: 264; SEQ ID NO: 261 and SEQ ID NO: 265; SEQ ID NO: 261 and SEQ ID NO: 266; SEQ ID NO: 261 and SEQ ID NO: 267; SEQ ID NO: 261 and SEQ ID NO: 268; SEQ ID NO: 261 and SEQ ID NO: 269; SEQ ID NO: 262 and SEQ ID NO: 263; SEQ ID NO: 262 and SEQ ID NO: 264; SEQ ID NO: 262 and SEQ ID NO: 265; SEQ ID NO: 262 and SEQ ID NO: 266; SEQ ID NO: 262 and SEQ ID NO: 267; SEQ ID NO: 262 and SEQ ID NO: 268; SEQ ID NO: 262 and SEQ ID NO: 269; SEQ ID NO: 263 and SEQ ID NO: 264; SEQ ID NO: 263 and SEQ ID NO: 265; SEQ ID NO: 263 and SEQ ID NO: 266; SEQ ID NO: 263 and SEQ ID NO: 267; SEQ ID NO: 263 and SEQ ID NO: 268; SEQ ID NO: 263 and SEQ ID NO: 269; SEQ ID NO: 264 and SEQ ID NO: 265; SEQ ID NO: 264 and SEQ ID NO: 266; SEQ ID NO: 264 and SEQ ID NO: 267; SEQ ID NO: 264 and SEQ ID NO: 268; SEQ ID NO: 264 and SEQ ID NO: 269; SEQ ID NO: 265 and SEQ ID NO: 266; SEQ ID NO: 265 and SEQ ID NO: 267; SEQ ID NO: 265 and SEQ ID NO: 268; SEQ ID NO: 265 and SEQ ID NO: 269; SEQ ID NO: 266 and SEQ ID NO: 267; SEQ ID NO: 266 and SEQ ID NO: 268; SEQ ID NO: 266 and SEQ ID NO: 269; SEQ ID NO: 267 and SEQ ID NO: 268; SEQ ID NO: 267 and SEQ ID NO: 269; SEQ ID NO: 268 and SEQ ID NO: 269.

[0306] In some embodiments, a method for treating DMD is provided comprising administering a composition comprising a Cas protein or a nucleic acid encoding a Cas protein and a pair of guide RNAs, wherein the pair of guide RNAs comprise or consist of any one of the pairs of guide sequences of any one of Tables 1B or 1D.

[0307] In some embodiments, a method for treating DMD is provided comprising administering a Cas protein or a nucleic acid encoding a Cas protein and a composition comprising one or more nucleic acid molecules encoding a pair of guide RNAs, wherein the pair of guide RNAs comprise or consist of one or more nucleic acid molecules encoding any one of the pairs of guide sequences of any one of Tables 1B or 1D.

[0308] In some embodiments, a method for treating DMD is provided comprising administering a Cas protein or a nucleic acid encoding a Cas protein and a composition comprising a pair of guide RNAs comprising or consisting of any one of the pairs of guide sequences of any one of the following:
[0309] a. SEQ ID NOs: 28 and 57; 31 and 57; 31 and 46; 32 and 69; 33 and 57; 33 and 69; 34 and 57; 36 and 69; 37 and 69; 37 and 46; 39 and 46; 40 and 46; 46 and 35; 46 and 62; 46 and 65; 46 and 67; 47 and 57; 48 and 57; 49 and 57; 51 and 57; 53 and 46; 54 and 46; 55 and 46; 58 and 46; 59 and 46; 60 and 46; 61 and 69; or 69 and 30; and
[0310] b. SEQ ID NOs: 243 and 252; 245 and 252; 252 and 253; 252 and 254; 252 and 256; 252 and 257; 252 and 258; 252 and 262; 252 and 264; 252 and 265; or 252 and 266.

[0311] In some embodiments, a method for treating DMD is provided comprising administering a Cas protein or a nucleic acid encoding a Cas protein and a composition comprising one or more nucleic acid molecules encoding a pair of guide RNAs, wherein the pair of guide RNAs comprise or consist of one or more nucleic acid molecules encoding any one of the pairs of guide sequences of any one of the following:
[0312] a. SEQ ID NOs: 28 and 57; 31 and 57; 31 and 46; 32 and 69; 33 and 57; 33 and 69; 34 and 57; 36 and 69; 37 and 69; 37 and 46; 39 and 46; 40 and 46; 46 and 35; 46 and 62; 46 and 65; 46 and 67; 47 and 57; 48 and 57; 49 and 57; 51 and 57; 53 and 46; 54 and 46; 55 and 46; 58 and 46; 59 and 46; 60 and 46; 61 and 69; or 69 and 30; and
[0313] b. SEQ ID NOs: 243 and 252; 245 and 252; 252 and 253; 252 and 254; 252 and 256; 252 and 257; 252 and 258; 252 and 262; 252 and 264; 252 and 265; or 252 and 266.

[0314] In some embodiments, a method for treating DMD further comprises administering a nucleic acid encoding an endonuclease. The appropriate endonuclease for use with each of the guide RNAs is provided herein, for example, in Table 2, column “enzyme.”

[0315] In some embodiments, the subject is a mammal. In some embodiments, the subject is human.

[0316] For treatment of a subject (e.g., a human), any of the compositions disclosed herein may be administered in a manner compatible with the dosage formulation and in such amount as is therapeutically effective. The compositions may be readily administered in a variety of dosage forms, such as injectable solutions. For parenteral administration in an aqueous solution, for example, the solution will generally be suitably buffered and the liquid diluent first rendered isotonic with, for example, sufficient saline or glucose. Such aqueous solutions may be used, for example, for intravenous, intramuscular, subcutaneous, and/or intraperitoneal administration.

### Combination Therapy

[0317] In some embodiments, the invention comprises combination therapies comprising any of the methods or uses described herein together with an additional therapy suitable for ameliorating DMD.

### Delivery of Guide RNA Compositions

[0318] The methods and uses disclosed herein may use any suitable approach for delivering the guide RNAs and compositions described herein. Exemplary delivery approaches include vectors, such as viral vectors; lipid nanoparticles; transfection; and electroporation. In some embodiments, vectors or LNPs associated with the single-vector guide RNAs/Cas9's disclosed herein are for use in preparing a medicament for treating DMD.

[0319] Lipid nanoparticles (LNPs) are a known means for delivery of nucleotide and protein cargo, and may be used for delivery of the guide RNAs, compositions, or pharmaceutical formulations disclosed herein. In some embodiments, the LNPs deliver nucleic acid, protein, or nucleic acid together with protein.

[0320] Electroporation is a well-known means for delivery of cargo, and any electroporation methodology may be used for delivering the single vectors disclosed herein.

[0321] In some embodiments, the invention comprises a method for delivering any one of the single vectors disclosed herein to an ex vivo cell, wherein the guide RNA is encoded by a vector, associated with an LNP, or in aqueous solution. In some embodiments, the guide RNA/LNP or guide RNA is also associated with a Cas9 or sequence encoding Cas9 (e.g., in the same vector, LNP, or solution).

[0322] In some embodiments, the disclosure provides for methods of using any of the guides, endonucleases, cells, or compositions disclosed herein in research methods. For example, any of the guides or endonucleases disclosed herein may be used alone or in combination in experiments under various parameters (e.g., temperatures, pH, types of cells) or combined with other reagents to evaluate the activity of the guides and/or endonucleases.

### EXAMPLES

[0323] The following examples are provided to illustrate certain disclosed embodiments and are not to be construed as limiting the scope of this disclosure in any way.

### Example 1: Exemplary DMD sgRNAs

[0324] Guide RNA comprising the guide sequences shown in Table 2 were prepared according to standard methods in a single guide (sgRNA) format. A single AAV vector was prepared that expresses one or more of the guide RNAs and a SaCas9 (for guide sequences having SEQ ID NOs: 11-15 or 27-69) or SluCas9 (for guide sequences having SEQ ID NOs: 243-269). The AAV vector was administered to cells in vitro to assess the ability of the AAV to express the guide RNA and Cas9, edit the targeted exon (see Table 2), and thereby treat DMD.

### Example 2: Evaluation of sgRNA Pairs

### A. Materials and Methods

[0325] 1. sgRNA Selection

[0326] A subset of SaCas9-KKH or SluCas9 sgRNAs found within the DMD gene was selected for indel frequency and profile evaluation. The selected sgRNAs for pair evaluation are shown in Tables 1A-ID and 2 and were prepared according to standard methods. The criteria used to select these sgRNAs included their potential to induce exon reframing and or skipping as a pair, in addition to the existence of a mouse, dog and NHP homologue counterpart. This selection included 43 sgRNAs located within exon 51. The number of predicted off target sites was determined for each sgRNA.

### 2. Human Primary Skeletal Muscle Myoblasts (HsMMs) Culture

[0327] On day one, frozen vials of HsMMs (lot 20TL070666 for FIGS. 2, 4, and 5A; lot 18TL269121 for FIG. 5B) were thawed and grown in complete growth media in a 37° C., 5% CO2, humidified incubator in T75 flasks. On day two, the growth media was renewed. On day three, the cells were passaged into T150 flasks. On day five, the media in each flask were changed. On day 6, the cells were harvested and electroporated with RNP (nucleofection).

### 3. Nucleofection of HsMM Cells

[0328] The selected sgRNAs for pair evaluation are shown in Tables 1A-1D and 2 and were chemically synthesized (Sythego). The Cas9 nuclease was recombinant purified SluCas9 (Aldevron). HsMM cells were nucleofected with RNP using the Lonza 4D nucleofector. For each sample, formulated RNP and 0.3e6 of cells were mixed in P5 solution. For dual-cut samples that contain 2 gRNAs, two separate RNPs were formulated with either gRNA of the pair. To formulate RNPs, the gRNA and protein were incubated for about 20 minutes at room temperature. For the experiment shown in FIG. 2, the RNPs were prepared in a 3:1 gRNA:Cas9 ratio at 18.75 pmols of sgRNA and of 6.25 pmols of Cas9; total of 37.5 pmols of RNA component and 12.5 pmols of Cas9 component. For the experiment shown in FIG. 4, the RNPs were prepared in a 6:1 gRNA:Cas9 ratio at 18.75 pmols of sgRNA and of 3.125 pmols of Cas9; total of 37.5 pmols of RNA component and 6.25 pmols of Cas9 component. For the experiment shown in FIG. 5, the RNPs were prepared in a 6:1 gRNA:Cas9 ratio at three different total RNP doses: i) high dose (H) at 75 pmol of sgRNA with 12.5 pmols of Cas9, ii) medium dose (M) at 37.5 pmol of sgRNA with 6.25 pmol of Cas9, and iii) low dose (L) 18.75 pmols of sgRNA and of 3.125 pmols of Cas9. For dual RNP nucleofections (FIG. 5), the total RNP dose reflects the sum of each RNP, e.g., high dose includes 37.5 pmols of sgRNA-1, 6.25 pmol Cas9 as RNP1, 37.5 pmols of sgRNA-2, and 6.25 pmol Cas9 as RNP2. After electroporation, 80 μL of complete growth media was added to each sample and samples were incubated in a 37° C., 5% CO2, humidified incubator for 10 minutes. After this recovery, the samples were transferred to 12-well plates containing 2 mL of complete growth media that had been previously equilibrated in a 37° C., 5% CO2, humidified incubator.

4. Cell Harvesting and gDNA Extraction

[0329] To determine cell viability 48 hours after nucleofection, the cells were stained with Hoechst and Propidium Iodide (Life Technologies). Cell viability was then assessed using ImageXpress Micro (Molecular Devices). In general, samples with an overall cell viability above 80% were harvested and analyzed for indel analysis. To isolate genomic DNA from HsMMs, the cells were washed with saline buffer, trypsinized and centrifuged. The cell pellets were treated with lysis buffer from the Maxwell RSC Blood DNA Kit (Promega #AS1400), and genomic DNAs were extracted using a Maxwell® RSC48 instrument (Promega #AS8500) according to the manufacturer's instruction. The concentrations of genomic DNAs were determined using Qubit™ 1×dsDNA HS Assay Kit (Thermo Fisher Scientific Q33231) according to the manufacturer's instruction.

### 5. Transfection of HEK293FT Cells

[0330] To evaluate indel frequency and profile, human HEK293FT cell line was used. HEK293FT cells were transfected in 12-well plates with 750 ng plasmid+2.5 μL of Lipofectamine 2000. Three days after transfection, cells were trypsinized and sorted for green fluorescent protein (GFP). GFP-positive cells were sorted directly into lysis buffer, and DNA extraction was performed using the Maxwell RSC Blood DNA Kit (Promega #AS1400) and using a Maxwell@ RSC48 instrument (Promega #AS8500) according to the manufacturer's instruction. PCR was then performed on the genomic DNA using DMD exon 51-specific primers that targeted the relevant cut site.

### 6. Amplicon Deep Sequencing Library Preparation and Data Analysis

[0331] To determine the gene editing efficiency, genomic DNA was amplified using primers flanking the DMD exon 51 genomic region. The following primer sequences were used: MiSeq_hE51_F: TCGTCGGCAGCGTCAGATGTGTATAAGAGACAGCATGAATAAGAGTTTGGCTCAAATTG (SEQ ID NO: 4) and MiSeq_hE51_R: GTCTCGTGGGCTCGGAGATGTGTATAAGAGACAGGAGAGTAAAGTGATTGGTGGAAAAT C (SEQ ID NO: 5). The size of the amplicons was verified by analyzing a small amount of the PCR products on 2% E-gels (Thermo Fisher Scientific). The PCR product was purified using AMPure XP beads (A63881). The purified PCR product was amplified again with primers that contain barcodes and Illumina adaptors. Multiple barcoded samples were pooled, combined with the PhiX library, and loaded onto the Illumina Mi-Seq platform. MiSeq Reagent Kit v3 (MS-102-3003) was used to produce a 600-cycle run.

[0332] For the data in FIGS. 1 and 2, indel analysis was performed using CRISPResso2±10-nt quantification window. (See, e.g., Clement et al., Nat Biotechnol. 2019 March; 37(3):224-226). Indel profiling consisted of six mutually exclusive indel categories, described below:
[0333] NE: non-edited;
[0334] Precise deletion (i.e. CleanCut);
[0335] RF.+1 (i.e. +1 bp): 1-nucleotide (nt) insertion leading to reframe;
[0336] RF. Other (i.e. Reframe): indels other than 1-nt insertion leading to reframe:
[0337] Deletion: not extending outside of the refraining window
[0338] Insertion: <17-nt (i.e., <6 amino acids);
[0339] Exon skipping: indels that disrupt the ±6-nt window of the exon/intron boundaries leading to potential exon skipping (outcome requiring validation):
[0340] The indel has >=9-nt overlap with the splicing window (to disrupt the GT/AG splicing sites)
[0341] OE: Other indels.

[0342] For the data in FIGS. 4-6, the editing outcomes from the sequencing data were characterized computationally. Indel frequencies at the cut site were tabulated using the reference amplicon sequence, protospacer sequence, cleavage offset, and the size of the quantification window centered around the cut site.

[0343] A stringent set of QC criteria was applied to filter poor quality samples. These criteria included:
[0344] Average base quality in the sample
[0345] Minimum fraction of reads that are of high sequencing quality
[0346] Minimum fraction of reads with a minimum read length post-trimming
[0347] Minimum fraction of reads remaining after decontamination (i.e., removing phiX reads)
[0348] Minimum fraction of reads that successfully merged
[0349] Minimum fraction of reads that successfully aligned
[0350] Minimum number of aligned reads

[0351] For samples passing all QC criteria, indels identified were classified into three expected types of indels:
[0352] Precise dual-cut: Edits that properly reframe the transcript resulting from the expected cuts from both gRNAs.
[0353] Refraining edits: Indels other than precise dual-cut that properly reframe the transcript.
[0354] Other edits: Indels that do not properly reframe the transcript.
   For each sample, total % editing and % editing for each type of expected indels (precise dual-cut, reframing edits, other edits) was reported.

### 7. AAV Configurations for the Dual Cut Single Vector Candidates

[0355] A combination of promoter orientations, promoter configurations, NLSs and scaffolds were selected for generating AAV plasmids and evaluation on sgRNA transgene expression, AAV manufacturability, and editing efficiency in vitro and in vivo. AAV plasmid configurations listed in Table 3.

TABLE 3

| Pol III | | | | | | | |
|---|---|---|---|---|---|---|---|
| Promoter | Orientation | Configuration | NLS1 | Endonuclease | NLS2 | NLS3 | Scaffold |
| hU6c:hU6c | ← [symbol] → | hU6c-Cas9- | c-Myc- | SluCas9 | SV-40-GSGS | Nucleoplasmin- | V5 |
| | | hU6c | GSVD | | | GSGS | |
| | ← [symbol] → | hU6c-Cas9- | c-Myc- | SaCas9-KKH | SV-40-GSGS | Nucleoplasmin- | V2 |
| | | hU6c | GSVD | | | GSGS | |
| | ← [symbol] → | hU6c-Cas9- | c-Myc- | SluCas9 | SV-40-MCS- | Nucleoplasmin- | V5 |
| | | hU6c | GSVD | | GSGS | GSGS | |
| | ← [symbol] → | hU6c-Cas9- | c-Myc- | SaCas9-KKH | SV-40-MCS- | Nucleoplasmin- | V2 |
| | | hU6c | GSVD | | GSGS | GSGS | |
| hU6:7SK2 | ← [symbol] → | hU6c-Cas9- | c-Myc- | SluCas9 | SV-40-GSGS | Nucleoplasmin- | V5 |
| | | 7SK2 | GSVD | | | GSGS | |
| | ← [symbol] → | hU6c-Cas9- | c-Myc- | SaCas9-KKH | SV-40-GSGS | Nucleoplasmin- | V2 |
| | | 7SK2 | GSVD | | | GSGS | |
| | ← [symbol] → | hU6c-Cas9- | c-Myc- | SluCas9 | SV-40-MCS- | Nucleoplasmin- | V5 |
| | | 7SK2 | GSVD | | GSGS | GSGS | |
| | ← [symbol] → | hU6c-Cas9- | c-Myc- | SaCas9-KKH | SV-40-MCS- | Nucleoplasmin- | V2 |
| | | 7SK2 | GSVD | | GSGS | GSGS | |
| hU6c:H1m | ← [symbol] → | hU6c-Cas9-H1m | c-Myc- | SluCas9 | SV-40-GSGS | Nucleoplasmin- | V5 |
| | | | GSVD | | | GSGS | |
| | ← [symbol] → | hU6c-Cas9-H1m | c-Myc- | SaCas9-KKH | SV-40-GSGS | Nucleoplasmin- | V2 |
| | | | GSVD | | | GSGS | |
| 7SK2:H1m | ← [symbol] → | 7SK2-Cas9- | SV-40-GS | SluCas9 | Nucleoplasmin | N/A | V5 |
| | | H1m | | | | | |
| | ← [symbol] → | 7SK2-Cas9- | SV-40-GS | SaCas9-KKH | Nucleoplasmin | N/A | V2 |
| | | H1m | | | | | |
| | ← [symbol] → | 7SK2-Cas9- | SV-40 (+) | SluCas9 | Nucleoplasmin | N/A | V5 |
| | | H1m | | | | | |
| | ← [symbol] → | 7SK2-Cas9- | SV-40 (+) | SaCas9-KKH | Nucleoplasmin | N/A | V2 |
| | | H1m | | | | | |
| | ← [symbol] → | 7SK2-Cas9- | c-Myc- | SluCas9 | SV-40-MCS- | Nucleoplasmin- | V5 |
| | | H1m | GSVD | | GSGS | GSGS | |
| | ← [symbol] → | 7SK2-Cas9- | c-Myc- | SaCas9-KKH | SV-40-MCS- | Nucleoplasmin- | V2 |
| | | H1m | GSVD | | GSGS | GSGS | |
| | ← [symbol] → | 7SK2-Cas9 | c-Myc- | SluCas9 | SV-40-MCS- | Nucleoplasmin- | V2 |
| | | H1m | GSVD | | GSGS | GSGS | |
| H1m:M11 | ← [symbol] → | H1m-Cas9-M11 | c-Myc- | SluCas9 | SV-40-MCS- | Nucleoplasmin- | V5 |
| | | | GSVD | | GSGS | GSGS | |
| | ← [symbol] → | H1m-Cas9-M11 | c-Myc- | SaCas9-KKH | SV-40-MCS- | Nucleoplasmin- | V5 |
| | | | GSVD | | GSGS | GSGS | |

### 8. Results

[0356] A set of sgRNAs found within the DMD gene was selected for evaluation of indel frequency and profiling, including 43 sgRNAs located within exon 51.

[0357] To evaluate indel frequency and editing profiles, plasmid transfection was performed in HEK293FT (FIG. 1), and Human Skeletal Muscle Myoblasts (HsMM) (FIG. 2A-B).

[0358] The editing frequency and indel profile of selected SaCas9, SaCas9-KKIH and SluCas9 sgRNA pairs targeting Exon 51 of DMD gene was determined, as shown in FIG. 1. Each stack bar represents a sgRNA pair and the bar height depicts the average frequency of the total edit. Different indel profiles for each pair of sgRNAs are represented by using distinct patterns. Error bars denote the standard deviation for each indel group.

[0359] The average indel frequency of sgRNAs targeting exon 51 of the DMD gene was determined in HEK294FT cells (FIG. 1), including precise deletions. The deletion size is shown at bottom.

[0360] The average indel frequency of sgRNAs targeting Exon 51 of the DMD gene was determined in HsMM cells (FIGS. 2A-B) as calculated by Inference of CRISPR Edit (ICE) via Sanger sequencing signal decomposition (FIG. 2A) and next generation sequencing (NGS) (FIG. 2B).

[0361] Using a different formulation (see Materials and Methods: Nucleofection of HsMM cells, above), the average indel frequency of sgRNAs targeting Exon 51 of the DMD gene was again determined in HsMM cells (FIGS. 4A-B) as calculated by next generation sequencing (NGS). Based on these results, the following guide pairs were selected for additional characterization: Slu31-Slu5 (SEQ ID NOs: 269 and 247), Slu31-Slu7 (SEQ ID NOs: 269 and 249), Slu10-24 (SEQ ID NOs: 252 and 262), Slu10-26 (SEQ ID NOs: 252 and 264), and Slu10-16 (SEQ ID NOs: 252 and 254).

[0362] Nuclease activity of the selected guide pairs was evaluated as a function of dose (FIGS. 5A-B). The results show that Slu31-Slu5 (SEQ ID NOs: 269 and 247) (FIG. 5A) generated the highest precise deletion levels of the selected guide pairs, followed by S1u10-S1u16 (SEQ ID NOs: 252 and 254) (FIG. 5B).

[0363] The robustness of the precise deletion regime was evaluated in response to perturbations in RNP stoichiometry (FIGS. 6A-B). The dual cut system appeared more robust for the E51Slu10 (SEQ ID NO: 252) dilution than the ES51u16 (SEQ ID NO: 254) dilution, suggesting that an AAV configuration with Slu16-Slu10 may be more efficacious at a lower dose than several of the other guide pairs tested. (FIG. 6A). The dual cut system displayed equal robustness for the dilution of either E51Slu10 or E51Slu26 (SEQ ID NO: 264) (FIG. 6B).

The application's sequence listing, which the Patent Office published only in electronic form, follows.

SEQUENCE LISTING (9014 sequences)

SEQ ID NO: 1 - DNA, 3171 bp, synthetic construct
  misc_feature 1..3171: note = Synthetic: sRGN 3.1
  source 1..3171: mol_type = other DNA
atgaatcagaaattcatcctgggactggacatcggcattacctctgtgggctacggcttgattgactacgagaccaagaacatcatcgacgccggcgttagactgtttcctgaggccaatgtggaaaacaacgagggcagacggtctaagcggggctctagacgactgaaaagaagaagaatccacagactggaaagagtgaagctgctgctgaccgagtacgacctgatcaataaggaacagatccctacaagcaacaacccctaccagattagagtgaagggcctgagcgagatcctgagcaaagacgagctggccatcgccctgctgcacctggccaagcggaggggcatccacaacgtggatgtggccgccgacaaggaggaaaccgccagcgactccctgagcaccaaagatcagatcaacaagaatgccaagttcctggagagcagatacgtgtgcgagctgcagaaggagagattggagaacgagggccacgtgcggggcgtggagaatagattcctgacaaaagatatcgtgcgggaagccaagaagatcatcgacacccagatgcagtactatcctgaaatcgacgaaaccttcaaggagaagtacatcagcctggtcgaaaccagacgcgagtatttcgagggccccggacagggctctcctttcggctggaacggcgatctgaagaagtggtacgagatgctgatgggacactgcacctacttccctcaagagctgagatctgtgaagtacgcctacagcgccgatctgttcaacgccctgaacgatctgaacaaccttatcatccagcgggacaattctgagaagctggaataccacgagaaatatcatatcatcgagaacgtctttaaacaaaagaaaaagcctaccctgaagcagatcgccaaggagatcggagtgaatcctgaggatatcaaaggctacagaatcacaaagtccggcacccctgagttcaccagctttaagctgttccacgacctgaagaaggtcgtgaaagaccacgccatcctcgatgacatcgatctgctgaaccagatcgctgagatcctgacaatctaccaggacaaagattctatcgtggctgaactgggacagctggaataccttatgagcgaggccgacaagcaaagcatctccgaactgaccggctacacgggcacccatagcctgagcctgaagtgtatgaacatgatcatcgatgagctgtggcactctagcatgaaccagatggaagttttcacctacctgaacatgcggcctaagaagtacgagctgaagggctaccagagaatccccaccgatatgatcgacgacgccatcctgagccccgtggtgaaaagaacattcatccagagcatcaacgtgatcaacaaggtgatcgagaagtacggcattccagaggacatcatcatcgagctggccagagaaaacaacagcgacgatagaaagaagtttatcaacaacctgcagaaaaaaaacgaggccacccggaagagaattaatgagatcatcggccagacaggcaaccagaacgccaaaaggatcgtggaaaaaatcagactgcacgaccagcaggagggcaagtgcctgtactctctggaaagcatccccctggaggacctgctgaacaatccaaatcactacgaggtggaccacatcatccctagaagcgtcagcttcgacaacagctaccacaacaaggtgctggtgaagcagagcgaaaacagtaagaaatccaacctgacaccttaccagtactttaacagcggcaagagcaagctgagctacaaccagttcaagcagcacatcctgaacctgtccaaatctcaggatagaatctccaagaaaaagaaggaatacctgctggaggagagagatatcaacaagttcgaagtccaaaaggagttcatcaacaggaacctggtggacacccggtacgccacaagagagctgacaaactacctgaaagcctacttcagcgctaacaacatgaacgtgaaggtgaaaaccatcaatggaagtttcacagactaccttcggaaggtgtggaagttcaagaaggaacggaatcacggctacaagcaccacgcagaggacgccctgattatagctaatgccgatttcctgttcaaagaaaacaagaagctgaaagccgtgaacagcgttctggaaaagcctgaaattgagaccaagcaactggatatacaggtggacagcgaggacaactactccgagatgttcatcatccctaaacaggtgcaggacatcaaagacttcagaaatttcaagtacagccacagagtggacaagaaacccaaccggcagctgatcaatgacaccctgtatagcacccgcaagaaggataacagcacctacatcgtccagaccatcaaggacatctacgctaaggacaacaccaccctgaaaaagcaatttgataagtcccccgaaaagtttctgatgtaccaacacgatcctagaaccttcgaaaagttggaggtgatcatgaagcaatatgccaacgagaagaacccactggccaagtaccatgaggagacaggagaatacctgaccaagtattctaagaagaataacggccccatcgtgaagtccctgaagtacattgggaacaaactcggaagccacctggacgtgacgcaccagttcaagagcagcaccaagaagctagtgaaactgagcatcaagaactacagattcgacgtgtacctgacagaaaagggctacaaatttgtgaccatcgcttacctgaatgtgttcaaaaaggacaattattactacatcccaaaggacaagtaccaggagcttaaagagaaaaaaaagatcaaggataccgaccagtttatcgctagcttctacaagaacgacctgattaagctgaacggcgacctgtacaagatcatcggcgtgaactctgacgaccggaacataatagagctggattattatgacatcaagtacaaggactactgcgagatcaacaacatcaagggcgagcctagaatcaaaaagaccatcgggaagaaaaccgagtctatcgaaaagtttacaacagacgtgctgggcaacctgtacctgcacagcacggaaaaggcccctcagctcatcttcaagagaggcctg

SEQ ID NO: 2 - DNA, 3168 bp, synthetic construct
  misc_feature 1..3168: note = Synthetic: sRGN 3.3
  source 1..3168: mol_type = other DNA
aaccagaagtttatcctgggcctggatatcggcatcacatccgtgggctacggcctgattgattacgaaaccaagaacatcattgatgccggcgtccggcttttccctgaagctaacgtggaaaacaatgagggcagacggagcaagagaggcagcagacggctgaagcggagaagaatccatagactcgaacgggtgaagctgctgctgaccgagtacgacctgatcaacaaggagcagatccccaccagcaacaacccataccagatcagagtgaaaggcctttctgagattctgagcaaggatgagctggctatcgctctgctccacctggccaagagaaggggaatccacaacgttgacgtggccgccgataaggaagagaccgccagcgatagcctgagcaccaaggaccagatcaacaagaacgccaagttcctggaaagcagatacgtgtgcgagctgcaaaaagagagactggaaaatgagggccatgtgcggggcgttgagaacagattcctgaccaaagacatcgtcagagaggccaagaaaattattgacacccagatgcagtactatcctgagatagacgagacctttaaggaaaagtacatcagcctggtggaaacaagaagagaatacttcgaaggacctggccagggctcccctttcggctggaacggcgacctgaagaagtggtacgagatgctgatgggccactgcacctacttcccccaggagctgcggagcgtgaagtacgcttacagcgccgacctgttcaatgccctgaacgacctgaacaatcttatcatccaaagagataacagcgagaaattagaataccacgagaagtaccacatcatcgagaatgtgttcaagcaaaagaagaagcctaccctgaagcagatcgccaaagagatcggcgtgaaccctgaggacatcaagggctatcggatcaccaagtccggcacccctgaattcaccagcttcaagctgtttcacgacctcaaaaaggtcgtgaaggaccacgccatcctggacgacatcgatctgctgaatcagatcgccgagatcctgaccatctaccaggacaaggactctatcgtggccgagcttggacagctggagtacctgatgagcgaggctgacaagcagagcatcagcgagctgaccggctacaccggaacccacagcctgtccctgaagtgcatgaacatgatcatcgacgagctgtggcactctagcatgaaccagatggaagtgttcacctacctgaacatgagacctaagaagtacgaactgaagggttaccagagaatcccaaccgacatgatcgacgacgccatcctgagccccgtggtgaagcggacctttatccagagcatcaatgtgatcaacaaggtgatcgagaaatacggcatccccgaggacatcatcatcgaactggccagagagaataactctgatgaccggaagaagttcatcaacaacctgcagaagaagaacgaagccaccagaaagcgcatcaacgagatcatcggccaaacagggaatcagaacgccaagaggatcgtggaaaagattcggctgcacgaccagcaggagggaaaatgcctgtacagcctggaaagcatccccctggaagatctactgaacaaccccaaccactacgaggtggatcacatcatccctagaagcgtgtcctttgacaacagttaccacaacaaggtgctggtgaagcaatccgagaactcgaagaagagcaacctgacaccttaccagtactttaacagcggcaagtccaagctgtcttataaccagttcaagcagcacatcctcaacctgtcaaagtctcaggacagaatctctaagaagaagaaggagtatctgctggaagagcgggacatcaacaagttcgaggtgcagaaagagttcattaacagaaacctggtcgacacccggtacgccacacgcgaactgacaagctacctgaaggcctacttctccgccaacaatatggacgtgaaggtcaagaccatcaatggcagcttcacaaatcacctgagaaaggtctggcggttcgacaagtacagaaaccacggctacaagcaccacgccgaggatgctctgattatcgccaacgccgacttcctgttcaaggaaaacaaaaaactgcagaacaccaacaagatcctggaaaaacctacaatcgagaacaacacaaagaaagtgacagtggaaaaagaggaagattacaacaacgtgtttgagacacctaagctggttgaggatatcaagcagtaccgggactataagtttagccacagagtggacaagaaacctaacaggcagctgatcaacgacactctgtacagcacaagaatgaaagatgagcacgattacatcgtgcagaccattaccgacatctacggcaaggacaacaccaatctgaagaagcagttcaacaaaaatcccgagaagttcctgatgtaccaaaatgaccctaagacattcgagaagctgagcatcatcatgaaacagtactctgatgagaagaacccactggccaagtactacgaggaaacaggcgaatacctgaccaagtactctaagaagaacaacggccctatcgtgaagaagatcaaactgctgggcaacaaagtgggaaatcatctggatgtgaccaataaatacgagaactctacaaagaaactggtgaagctgagcattaagaactacagattcgacgtctacctgacagaaaagggatacaagttcgtgaccatcgcctacctgaacgtgttcaagaaagacaactactactacatcccaaaagacaagtaccaagagttaaaagagaagaagaagataaaggataccgaccagtttatcgcttctttctacaagaacgacctgatcaagctgaacggtgatctgtacaaaatcatcggagtgaatagcgatgacagaaatatcatcgaactggattactatgacatcaagtacaaagattattgtgaaatcaacaacatcaagggagagcccagaattaagaaaaccatcggcaagaaaacagagagcatcgagaaattcaccacagatgtgctgggcaacctgtacctgcacagcacagagaaagcccctcagctcatcttcaagagaggcctg

SEQ ID NO: 3 - DNA, 3162 bp, synthetic construct
  misc_feature 1..3162: note = Synthetic: sRGN 4
  source 1..3162: mol_type = other DNA
atgaatcaaaagtttatcctgggtctggacatcggcatcacatctgtgggctacggccttatcgattacgagaccaagaatatcattgatgctggcgtacggctgttccctgaggctaacgtggaaaacaacgagggtagacggagcaagagaggcagcagacggctgaaacggcgtagaatccaccggctggagagagtgaagaagttgctggaagattacaacttgctggatcaatcccagatcccccagagcactaatccttatgctatccgggtgaagggcctgtctgaagccctgagcaaagacgagctggtgattgccctgctgcacatcgcgaagagaagaggcatccacaatatcaatgtgtcctctgaggatgaggatgccagcaacgagctgagcactaaggaacagatcaatcggaacaacaagctgctgaaggacaagtacgtgtgtgaagtgcagctgcagagactgaaggaaggccagataagaggcgaaaagaacagattcaagacaacagacatcctgaaagaaatcgaccagctgctgaaggtccagaaggactaccacaacctcgacatcgatttcattaaccagtacaaggaaatcgtggaaaccaggagagagtacttcgagggccctggcaagggctccccatacggctgggagggcgaccccaaggcctggtacgaaaccctgatgggccactgcacctacttccccgacgaactgagaagcgtcaagtacgcctacagcgccgatctgttcaacgccctgaacgacctgaacaacctggtgatccagcgggacggcctgagcaaactggagtaccatgaaaagtatcatatcatcgagaacgtgttcaagcagaagaaaaaacctaccctgaagcagatcgccaacgagatcaacgtgaaccctgaggacattaaaggctacagaatcaccaaaagcggcaagccagagttcaccagcttcaagctgtttcacgacctgaagaaggtcgtgaaagaccacgccatcctggacgacatcgatctgcttaaccagatcgctgaaatcctcacaatctaccaggacaaggactctatcgtggccgagctgggacagctggaatacctgatgagcgaggccgataagcagagcatcagcgagctgaccggctacaccggaacccacagcctgagcctgaagtgtatgaacatgatcatcgacgagctgtggcacagctctatgaaccagatggaagtattcacctacctgaacatgagacctaagaagtacgaactgaagggctatcagagaatccctacagacatgatcgacgatgccatcctgtctcctgtggtgaagagaaccttcatccagtctatcaacgtgatcaacaaggtgatcgaaaagtacggaatccctgaagatatcatcatcgaactggccagagagaacaactccgacgacagaaagaaattcatcaacaacctgcagaagaagaatgaggccacacggaagcggattaatgagatcatcggccaaaccggcaaccagaacgccaaaagaatcgtggaaaagatccggctgcacgatcagcaggagggcaaatgcctgtacagcctggagagcatccccctggaggacctgctcaacaaccccaaccactacgaggtggatcacatcatcccaagatctgttagcttcgacaacagctaccacaacaaggtgctggtgaagcaaagcgaaaactctaagaaatctaacctgacaccttaccagtactttaacagcggcaagtccaagctgtcttataaccagtttaagcagcacatcctgaacctgagcaagtcccaggatagaatcagcaaaaaaaagaaggaatacctgctggaggaacgcgacatcaataaatttgaggtgcaaaaggagttcatcaaccggaacctggtggacacccggtacgccaccagagaactgaccaactacctgaaagcctacttcagcgccaacaacatgaacgtgaaggtgaaaaccatcaacggaagcttcaccgactacctgcggaaggtgtggaagttcaagaaagagcggaatcacggctataagcaccacgctgaggacgctctgatcatcgccaatgccgatttcctgttcaaggaaaacaagaagttaaaggccgtgaactctgtcctggagaagcccgagatcgagacaaagcagctggacatccaagtggactcagaggacaattactctgagatgttcatcatccccaagcaggtgcaggacatcaaggattttagaaatttcaagtacagccatagagtggacaagaagcccaatagacagctgatcaacgatacactgtacagcaccagaaagaaggacaacagcacatatatcgtccagaccatcaaggacatttacgcaaaggataacaccacactgaagaagcagttcgacaaaagccctgagaagttcctgatgtaccaacacgaccctcggaccttcgagaagttagaggttatcatgaaacagtacgccaacgagaaaaaccctctggccaagtaccacgaggaaaccggagaatacctgacaaaatatagcaagaagaacaacggccccatcgtgaaaagcctgaagtacatcggcaacaagctgggcagccacctggacgtgacccaccagttcaagagcagcaccaagaagctggtcaagctgagcatcaagccttataggttcgacgtgtacctgacagataagggatacaagttcatcaccatcagctacctggatgttctgaaaaaggacaattactactacatccctgagcagaagtacgacaaactcaagctgggcaaggccatcgataagaatgccaagttcatcgcatctttttacaagaacgacctgatcaaactggacggcgagatctacaagatcataggagtgaacagcgacaccaggaatatgatcgagctcgatctgcctgacatcagatacaaggaatactgcgagctgaacaacatcaagggagagcctagaatcaagaaaaccatcggcaagaaggtgaacagcatcgagaaacttacaacagatgtgctcggcaacgtgttcaccaacacccagtacaccaagccacagctgctgtttaagcgggggaac

SEQ ID NO: 4 - DNA, 59 bp, synthetic construct
  misc_feature 1..59: note = Synthetic: MiSeq_hE51_F primer
  source 1..59: mol_type = other DNA
tcgtcggcagcgtcagatgtgtataagagacagcatgaataagagtttggctcaaattg

SEQ ID NO: 5 - DNA, 60 bp, synthetic construct
  misc_feature 1..60: note = Synthetic: MiSeq_hE51_R primer
  source 1..60: mol_type = other DNA
gtctcgtgggctcggagatgtgtataagagacaggagagtaaagtgattggtggaaaatc

SEQ ID NO: 6 - DNA, 144 bp, synthetic construct
  source 1..144: mol_type = other DNA
cggccactccctctctgcgcgctcgctcgctcactgaggccgggcgaccaaaggtcgcccgacgcccgggctttgcccgggcggcctcagtgagcgagcgagcgcgcagagagggagtggccaactccatcactaggggttcct

SEQ ID NO: 7 - DNA, 138 bp, synthetic construct
  source 1..138: mol_type = other DNA
aggaacccctagtgatggagttggccactccctctctgcgcgctcgctcgctcactgaggccgggcgaccaaaggtcgcccgacgcccgggctttgcccgggcggcctcagtgagcgagcgagcgcgcagagagggaa

SEQ ID NO: 8 - protein, 1368 aa, Staphylococcus aureus [sequence omitted]

SEQ ID NO: 9 - protein, 9 aa, synthetic construct
PAAKKKKLD

SEQ ID NO: 10 - skipped

SEQ ID NO: 11 - DNA, 22 bp, synthetic construct
  misc_feature 1..22: note = Synthetic: E51Sa1
  source 1..22: mol_type = other DNA
tagtaaccacaggttgtgtcac

SEQ ID NO: 12 - DNA, 22 bp, synthetic construct
  misc_feature 1..22: note = Synthetic: E51Sa2
  source 1..22: mol_type = other DNA
gttgtgtcaccagagtaacagt

SEQ ID NO: 13 - DNA, 22 bp, synthetic construct
  misc_feature 1..22: note = Synthetic: E51Sa4
  source 1..22: mol_type = other DNA
gagggtgatggtgggtgacctt

SEQ ID NO: 14 - DNA, 22 bp, synthetic construct
  misc_feature 1..22: note = Synthetic: E51Sa5
  source 1..22: mol_type = other DNA
tataaaatcacagagggtgatg

SEQ ID NO: 15 - DNA, 22 bp, synthetic construct
  misc_feature 1..22: note = Synthetic: E51Sa6
  source 1..22: mol_type = other DNA
ttgatcaagttataaaatcaca

SEQ ID NO: 16-26 - skipped (11 entries)

SEQ ID NO: 27 - DNA, 22 bp, synthetic construct
  misc_feature 1..22: note = Synthetic: E51SaCas9KKH1
  source 1..22: mol_type = other DNA
tcattttttctcataccttctg

SEQ ID NO: 28 - DNA, 22 bp, synthetic construct
  misc_feature 1..22: note = Synthetic: E51SaCas9KKH2
  source 1..22: mol_type = other DNA
ttttttctcataccttctgctt

SEQ ID NO: 29 - DNA, 22 bp, synthetic construct
  misc_feature 1..22: note = Synthetic: E51SaCas9KKH3
  source 1..22: mol_type = other DNA
ccttctgcttgatgatcatctc

SEQ ID NO: 30 - DNA, 22 bp, synthetic construct
  misc_feature 1..22: note = Synthetic: E51SaCas9KKH4
  source 1..22: mol_type = other DNA
atgatcatctcgttgatatcct

SEQ ID NO: 31 - DNA, 22 bp, synthetic construct
  misc_feature 1..22: note = Synthetic: E51SaCas9KKH5
  source 1..22: mol_type = other DNA
aaggtcacccaccatcaccctc

SEQ ID NO: 32 - DNA, 22 bp, synthetic construct
  misc_feature 1..22: note = Synthetic: E51SaCas9KKH6
  source 1..22: mol_type = other DNA
atcaccctctgtgattttataa

SEQ ID NO: 33 - DNA, 22 bp, synthetic construct
  misc_feature 1..22: note = Synthetic: E51SaCas9KKH7
  source 1..22: mol_type = other DNA
ataacttgatcaagcagagaaa

SEQ ID NO: 34 - DNA, 22 bp, synthetic construct
  misc_feature 1..22: note = Synthetic: E51SaCas9KKH8
  source 1..22: mol_type = other DNA
cttgatcaagcagagaaagcca

SEQ ID NO: 35 - DNA, 22 bp, synthetic construct
  misc_feature 1..22: note = Synthetic: E51SaCas9KKH9
  source 1..22: mol_type = other DNA
atcaagcagagaaagccagtcg

SEQ ID NO: 36 - DNA, 22 bp, synthetic construct
  misc_feature 1..22: note = Synthetic: E51SaCas9KKH10
  source 1..22: mol_type = other DNA
cagtcggtaagttctgtccaag

SEQ ID NO: 37 - DNA, 22 bp, synthetic construct
  misc_feature 1..22: note = Synthetic: E51SaCas9KKH11
  source 1..22: mol_type = other DNA
gtaagttctgtccaagcccggt

SEQ ID NO: 38 - DNA, 22 bp, synthetic construct
  misc_feature 1..22: note = Synthetic: E51SaCas9KKH12
  source 1..22: mol_type = other DNA
agcccggttgaaatctgccaga

SEQ ID NO: 39 - DNA, 22 bp, synthetic construct
  misc_feature 1..22: note = Synthetic: E51SaCas9KKH13
  source 1..22: mol_type = other DNA
agcaggtacctccaacatcaag

SEQ ID NO: 40 - DNA, 22 bp, synthetic construct
  misc_feature 1..22: note = Synthetic: E51SaCas9KKH14
  source 1..22: mol_type = other DNA
caacatcaaggaagatggcatt

SEQ ID NO: 41 - DNA, 22 bp, synthetic construct
  misc_feature 1..22: note = Synthetic: E51SaCas9KKH15
  source 1..22: mol_type = other DNA
aggaagatggcatttctagttt

SEQ ID NO: 42 - DNA, 22 bp, synthetic construct
  misc_feature 1..22: note = Synthetic: E51SaCas9KKH16
  source 1..22: mol_type = other DNA
atggcatttctagtttggagat

SEQ ID NO: 43 - DNA, 22 bp, synthetic construct
  misc_feature 1..22: note = Synthetic: E51SaCas9KKH17
  source 1..22: mol_type = other DNA
ctagtttggagatggcagtttc

SEQ ID NO: 44 - DNA, 22 bp, synthetic construct
  misc_feature 1..22: note = Synthetic: E51SaCas9KKH18
  source 1..22: mol_type = other DNA
gatggcagtttccttagtaacc

SEQ ID NO: 45 - DNA, 22 bp, synthetic construct
  misc_feature 1..22: note = Synthetic: E51SaCas9KKH19
  source 1..22: mol_type = other DNA
tagtaaccacaggttgtgtcac

SEQ ID NO: 46 - DNA, 22 bp, synthetic construct
  misc_feature 1..22: note = Synthetic: E51SaCas9KKH20
  source 1..22: mol_type = other DNA
ccacaggttgtgtcaccagagt

SEQ ID NO: 47 - DNA, 22 bp, synthetic construct
  misc_feature 1..22: note = Synthetic: E51SaCas9KKH21
  source 1..22: mol_type = other DNA
gttgtgtcaccagagtaacagt

SEQ ID NO: 48 - DNA, 22 bp, synthetic construct
  misc_feature 1..22: note = Synthetic: E51SaCas9KKH22
  source 1..22: mol_type = other DNA
gagtaacagtctgagtaggagc

SEQ ID NO: 49 - DNA, 22 bp, synthetic construct
  misc_feature 1..22: note = Synthetic: E51SaCas9KKH23
  source 1..22: mol_type = other DNA
tctgagtaggagctaaaatatt

SEQ ID NO: 50 - DNA, 22 bp, synthetic construct
  misc_feature 1..22: note = Synthetic: E51SaCas9KKH24
  source 1..22: mol_type = other DNA
agaaggtatgagaaaaaatgat

SEQ ID NO: 51 - DNA, 22 bp, synthetic construct
  misc_feature 1..22: note = Synthetic: E51SaCas9KKH25
  source 1..22: mol_type = other DNA
tcaagcagaaggtatgagaaaa

SEQ ID NO: 52 - DNA, 22 bp, synthetic construct
  misc_feature 1..22: note = Synthetic: E51SaCas9KKH26
  source 1..22: mol_type = other DNA
tcatcaagcagaaggtatgaga

SEQ ID NO: 53 - DNA, 22 bp, synthetic construct
  misc_feature 1..22: note = Synthetic: E51SaCas9KKH27
  source 1..22: mol_type = other DNA
tcaacgagatgatcatcaagca

SEQ ID NO: 54 - DNA, 22 bp, synthetic construct
  misc_feature 1..22: note = Synthetic: E51SaCas9KKH28
  source 1..22: mol_type = other DNA
gtgaccttgaggatatcaacga

SEQ ID NO: 55 - DNA, 22 bp, synthetic construct
  misc_feature 1..22: note = Synthetic: E51SaCas9KKH29
  source 1..22: mol_type = other DNA
tgggtgaccttgaggatatcaa

SEQ ID NO: 56 - DNA, 22 bp, synthetic construct
  misc_feature 1..22: note = Synthetic: E51SaCas9KKH30
  source 1..22: mol_type = other DNA
gagggtgatggtgggtgacctt

SEQ ID NO: 57 - DNA, 22 bp, synthetic construct
  misc_feature 1..22: note = Synthetic: E51SaCas9KKH31
  source 1..22: mol_type = other DNA
tataaaatcacagagggtgatg

SEQ ID NO: 58 - DNA, 22 bp, synthetic construct
  misc_feature 1..22: note = Synthetic: E51SaCas9KKH32
  source 1..22: mol_type = other DNA
aagttataaaatcacagagggt

SEQ ID NO: 59 - DNA, 22 bp, synthetic construct
  misc_feature 1..22: note = Synthetic: E51SaCas9KKH33
  source 1..22: mol_type = other DNA
atcaagttataaaatcacagag

SEQ ID NO: 60 - DNA, 22 bp, synthetic construct
  misc_feature 1..22: note = Synthetic: E51SaCas9KKH34
  source 1..22: mol_type = other DNA
ttgatcaagttataaaatcaca

SEQ ID NO: 61 - DNA, 22 bp, synthetic construct
  misc_feature 1..22: note = Synthetic: E51SaCas9KKH35
  source 1..22: mol_type = other DNA
ctttctctgcttgatcaagtta

SEQ ID NO: 62 - DNA, 22 bp, synthetic construct
  misc_feature 1..22: note = Synthetic: E51SaCas9KKH36
  source 1..22: mol_type = other DNA
ccgactggctttctctgcttga

SEQ ID NO: 63 - DNA, 22 bp, synthetic construct
  misc_feature 1..22: note = Synthetic: E51SaCas9KKH37
  source 1..22: mol_type = other DNA
acttaccgactggctttctctg

SEQ ID NO: 64 - DNA, 22 bp, synthetic construct
  misc_feature 1..22: note = Synthetic: E51SaCas9KKH38
  source 1..22: mol_type = other DNA
gatgttggaggtacctgctctg

SEQ ID NO: 65 - DNA, 22 bp, synthetic construct
  misc_feature 1..22: note = Synthetic: E51SaCas9KKH39
  source 1..22: mol_type = other DNA
aaatgccatcttccttgatgtt

SEQ ID NO: 66 - DNA, 22 bp, synthetic construct
  misc_feature 1..22: note = Synthetic: E51SaCas9KKH40
  source 1..22: mol_type = other DNA
ccaaactagaaatgccatcttc

SEQ ID NO: 67 - DNA, 22 bp, synthetic construct
  misc_feature 1..22: note = Synthetic: E51SaCas9KKH41
  source 1..22: mol_type = other DNA
aggaaactgccatctccaaact

SEQ ID NO: 68 - DNA, 22 bp, synthetic construct
  misc_feature 1..22: note = Synthetic: E51SaCas9KKH42
  source 1..22: mol_type = other DNA
ctgttactctggtgacacaacc

SEQ ID NO: 69 - DNA, 22 bp, synthetic construct
  misc_feature 1..22: note = Synthetic: E51SaCas9KKH43
  source 1..22: mol_type = other DNA
tagctcctactcagactgttac

SEQ ID NO: 70-242 - skipped (173 entries)

SEQ ID NO: 243 - DNA, 22 bp, synthetic construct
  misc_feature 1..22: note = Synthetic: E51Slu1
  source 1..22: mol_type = other DNA
tgatcatctcgttgatatcctc

SEQ ID NO: 244 - DNA, 22 bp, synthetic construct
  misc_feature 1..22: note = Synthetic: E51Slu2
  source 1..22: mol_type = other DNA
ttgatcaagcagagaaagccag

SEQ ID NO: 245 - DNA, 22 bp, synthetic construct
  misc_feature 1..22: note = Synthetic: E51Slu3
  source 1..22: mol_type = other DNA
agtcggtaagttctgtccaagc

SEQ ID NO: 246 - DNA, 22 bp, synthetic construct
  misc_feature 1..22: note = Synthetic: E51Slu4
  source 1..22: mol_type = other DNA
gcccggttgaaatctgccagag

SEQ ID NO: 247 - DNA, 22 bp, synthetic construct
  misc_feature 1..22: note = Synthetic: E51Slu5
  source 1..22: mol_type = other DNA
cagagcaggtacctccaacatc

SEQ ID NO: 248 - DNA, 22 bp, synthetic construct
  misc_feature 1..22: note = Synthetic: E51Slu6
  source 1..22: mol_type = other DNA
ggtacctccaacatcaaggaag

SEQ ID NO: 249 - DNA, 22 bp, synthetic construct
  misc_feature 1..22: note = Synthetic: E51Slu7
  source 1..22: mol_type = other DNA
caaggaagatggcatttctagt

SEQ ID NO: 250 - DNA, 22 bp, synthetic construct
  misc_feature 1..22: note = Synthetic: E51Slu8
  source 1..22: mol_type = other DNA
agatggcatttctagtttggag

SEQ ID NO: 251 - DNA, 22 bp, synthetic construct
  misc_feature 1..22: note = Synthetic: E51Slu9
  source 1..22: mol_type = other DNA
atggcagtttccttagtaacca

SEQ ID NO: 252 - DNA, 22 bp, synthetic construct
  misc_feature 1..22: note = Synthetic: E51Slu10
  source 1..22: mol_type = other DNA
gtcaccagagtaacagtctgag

SEQ ID NO: 253 - DNA, 22 bp, synthetic construct
  misc_feature 1..22: note = Synthetic: E51Slu15
  source 1..22: mol_type = other DNA
caacgagatgatcatcaagcag

SEQ ID NO: 254 - DNA, 22 bp, synthetic construct
  misc_feature 1..22: note = Synthetic: E51Slu16
  source 1..22: mol_type = other DNA
gagggtgatggtgggtgacctt

SEQ ID NO: 255 - DNA, 22 bp, synthetic construct
  misc_feature 1..22: note = Synthetic: E51Slu17
  source 1..22: mol_type = other DNA
ataaaatcacagagggtgatgg

SEQ ID NO: 256 - DNA, 22 bp, synthetic construct
  misc_feature 1..22: note = Synthetic: E51Slu18
  source 1..22: mol_type = other DNA
tataaaatcacagagggtgatg

SEQ ID NO: 257 - DNA, 22 bp, synthetic construct
  misc_feature 1..22: note = Synthetic: E51Slu19
  source 1..22: mol_type = other DNA
agttataaaatcacagagggtg

SEQ ID NO: 258 - DNA, 22 bp, synthetic construct
  misc_feature 1..22: note = Synthetic: E51Slu20
  source 1..22: mol_type = other DNA
tgatcaagttataaaatcacag

SEQ ID NO: 259 - DNA, 22 bp, synthetic construct
  misc_feature 1..22: note = Synthetic: E51Slu21
  source 1..22: mol_type = other DNA
ttgatcaagttataaaatcaca

SEQ ID NO: 260 - DNA, 22 bp, synthetic construct
  misc_feature 1..22: note = Synthetic: E51Slu22
  source 1..22: mol_type = other DNA
gggcttggacagaacttaccga

SEQ ID NO: 261 - DNA, 22 bp, synthetic construct
  misc_feature 1..22: note = Synthetic: E51Slu23
  source 1..22: mol_type = other DNA
ctctggcagatttcaaccgggc

SEQ ID NO: 262 - DNA, 22 bp, synthetic construct
  misc_feature 1..22: note = Synthetic: E51Slu24
  source 1..22: mol_type = other DNA
acctgctctggcagatttcaac

SEQ ID NO: 263 - DNA, 22 bp, synthetic construct
  misc_feature 1..22: note = Synthetic: E51Slu25
  source 1..22: mol_type = other DNA
tacctgctctggcagatttcaa

SEQ ID NO: 264 - DNA, 22 bp, synthetic construct
  misc_feature 1..22: note = Synthetic: E51Slu26
  source 1..22: mol_type = other DNA
cttgatgttggaggtacctgct

SEQ ID NO: 265 - DNA, 22 bp, synthetic construct
  misc_feature 1..22: note = Synthetic: E51Slu27
  source 1..22: mol_type = other DNA
aatgccatcttccttgatgttg

SEQ ID NO: 266 - DNA, 22 bp, synthetic construct
  misc_feature 1..22: note = Synthetic: E51Slu28
  source 1..22: mol_type = other DNA
agaaatgccatcttccttgatg

SEQ ID NO: 267 - DNA, 22 bp, synthetic construct
  misc_feature 1..22: note = Synthetic: E51Slu29
  source 1..22: mol_type = other DNA
ggtgacacaacctgtggttact

SEQ ID NO: 268 - DNA, 22 bp, synthetic construct
  misc_feature 1..22: note = Synthetic: E51Slu30
  source 1..22: mol_type = other DNA
tgttactctggtgacacaacct

SEQ ID NO: 269 - DNA, 22 bp, synthetic construct
  misc_feature 1..22: note = Synthetic: E51Slu31
  source 1..22: mol_type = other DNA
agctcctactcagactgttact

SEQ ID NO: 270-499 - skipped (230 entries)

SEQ ID NO: 500 - DNA, 85 bp, synthetic construct
  misc_feature 1..85: note = Synthetic
  source 1..85: mol_type = other DNA
tttaagtactctgtgctggaaacagcacagaatctacttaaacaaggcaaaatgccgtgtttatctcgtcaacttgttggcgaga

SEQ ID NO: 501 - DNA, 77 bp, synthetic construct
  misc_feature 1..77: note = Synthetic
  source 1..77: mol_type = other DNA
gttttagtactctggaaacagaatctactaaaacaaggcaaaatgccgtgtttatctcgtcaacttgttggcgagat

SEQ ID NO: 502 - DNA, 87 bp, synthetic construct
  misc_feature 1..87: note = Synthetic
  source 1..87: mol_type = other DNA
gtttaagtactctgtgctggaaacagcacagaatctacttaaacaaggcaaaatgccgtgtttatctcgtcaacttgttggcgagat

SEQ ID NO: 503 - DNA, 77 bp, synthetic construct
  misc_feature 1..77: note = Synthetic
  source 1..77: mol_type = other DNA
gtttaagtactctggaaacagaatctacttaaacaaggcaaaatgccgtgtttatctcgtcaacttgttggcgagat

SEQ ID NO: 504 - DNA, 77 bp, synthetic construct
  misc_feature 1..77: note = Synthetic
  source 1..77: mol_type = other DNA
gtttcagtactctggaaacagaatctactgaaacaaggcaaaatgccgtgtttatctcgtcaacttgttggcgagat

SEQ ID NO: 505-549 - skipped (45 entries)

SEQ ID NO: 550 - protein, 4 aa, synthetic construct
  REGION 1..4: note = Synthetic
GSVD

SEQ ID NO: 551 - protein, 4 aa, synthetic construct
  REGION 1..4: note = Synthetic
GSGS

SEQ ID NO: 552-599 - skipped (48 entries)

SEQ ID NO: 600 - DNA, 76 bp, synthetic construct
  misc_feature 1..76: note = Synthetic
  source 1..76: mol_type = other DNA
gttttagtactctggaaacagaatctactgaaacaagacaatatgtcgtgtttatcccatcaatttattggtggga

SEQ ID NO: 601 - DNA, 86 bp, synthetic construct
  misc_feature 1..86: note = Synthetic: Slu-VCGT-4.5
  source 1..86: mol_type = other DNA
gtttaagtactctgtgctggaaacagcacagaatctactgaaacaagacaatatgtcgtgtttatcccatcaatttattggtggga

SEQ ID NO: 602-699 - skipped (98 entries)

SEQ ID NO: 700 - DNA, 450 bp, synthetic construct
  misc_feature 1..450: note = Synthetic
  source 1..450: mol_type = other DNA
ctagactagcatgctgcccatgtaaggaggcaaggcctggggacacccgagatgcctggttataattaacccagacatgtggctgcccccccccccccaacacctgctgcctctaaaaataaccctgcatgccatgttcccggcgaagggccagctgtcccccgccagctagactcagcacttagtttaggaaccagtgagcaagtcagcccttggggcagcccatacaaggccatggggctgggcaagctgcacgcctgggtccggggtgggcacggtgcccgggcaacgagctgaaagctcatctgctctcaggggcccctccctggggacagcccctcctggctagtcacaccctgtaggctcctctatataacccaggggcacaggggctgccctcattctaccaccacctccacagcacagacagacactcaggagccagccagc

SEQ ID NO: 701 - DNA, 436 bp, synthetic construct
  misc_feature 1..436: note = Synthetic
  source 1..436: mol_type = other DNA
tgcccatgtaaggaggcaaggcctggggacacccgagatgcctggttataattaacccagacatgtggctgcccccccccccccaacacctgctgcctctaaaaataaccctgcatgccatgttcccggcgaagggccagctgtcccccgccagctagactcagcacttagtttaggaaccagtgagcaagtcagcccttggggcagcccatacaaggccatggggctgggcaagctgcacgcctgggtccggggtgggcacggtgcccgggcaacgagctgaaagctcatctgctctcaggggcccctccctggggacagcccctcctggctagtcacaccctgtaggctcctctatataacccaggggcacaggggctgccctcattctaccaccacctccacagcacagacagacactcaggagccagccagc

SEQ ID NO: 702 - DNA, 472 bp, synthetic construct
  misc_feature 1..472: note = Synthetic
  source 1..472: mol_type = other DNA
cgagtccaacacccgtgggaatcccatgggcaccatggcccctcgctccaaaaatgctttcgcgtcgcgcagacactgctcggtagtttcggggatcagcgtttgagtaagagcccgcgtctgaaccctccgcgccgccccggccccagtggaaagacgcgcaggcaaaacgcaccacgtgacggagcgtgaccgcgcgccgagcgcgcgccaaggtcgggcaggaagagggcctatttcccatgattccttcatatttgcatatacgatacaaggctgttagagagataattagaattaatttgactgtaaacacaaagatattagtacaaaatacgtgacgtagaaagtaataatttcttgggtagtttgcagttttaaaattatgttttaaaatggactatcatatgcttaccgtaacttgaaagtatttcgatttcttggctttatatatcttgtggaaaggacgaaa

SEQ ID NO: 703 - DNA, 108 bp, synthetic construct
  misc_feature 1..108: note = Synthetic
  source 1..108: mol_type = other DNA
gctcggcgcgcccatatttgcatgtcgctatgtgttctgggaaatcaccataaacgtgaaatgtctttggatttgggaatcttataagttctgtatgagaccacggta

SEQ ID NO: 704 - DNA, 251 bp, synthetic construct
  misc_feature 1..251: note = Synthetic
  source 1..251: mol_type = other DNA
tgacggcgcgccctgcagtatttagcatgccccacccatctgcaaggcattctggatagtgtcaaaacagccggaaatcaagtccgtttatctcaaactttagcattttgggaataaatgatatttgctatgctggttaaattagattttagttaaatttcctgctgaagctctagtacgataagtaacttgacctaagtgtaaagttgagatttccttcaggtttatatagcttgtgcgccgcctgggta

SEQ ID NO: 705 - DNA, 249 bp, synthetic construct
  misc_feature 1..249: note = Synthetic
  source 1..249: mol_type = other DNA
gagggcctatttcccatgattccttcatatttgcatatacgatacaaggctgttagagagataattggaattaatttgactgtaaacacaaagatattagtacaaaatacgtgacgtagaaagtaataatttcttgggtagtttgcagttttaaaattatgttttaaaatggactatcatatgcttaccgtaacttgaaagtatttcgatttcttggctttatatatcttgtggaaaggacgaaacacc

SEQ ID NO: 706 - DNA, 243 bp, synthetic construct
  misc_feature 1..243: note = Synthetic
  source 1..243: mol_type = other DNA
ctgcagtatttagcatgccccacccatctgcaaggcattctggatagtgtcaaaacagccggaaatcaagtccgtttatctcaaactttagcattttgggaataaatgatatttgctatgctggttaaattagattttagttaaatttcctgctgaagctctagtacgataagcaacttgacctaagtgtaaagttgagacttccttcaggtttatatagcttgtgcgccgcttgggtacctc

SEQ ID NO: 707 - DNA, 100 bp, synthetic construct
  misc_feature 1..100: note = Synthetic
  source 1..100: mol_type = other DNA
aatatttgcatgtcgctatgtgttctgggaaatcaccataaacgtgaaatgtctttggatttgggaatcttataagttctgtatgagaccactctttccc

SEQ ID NO: 708 - DNA, 100 bp, synthetic construct
  misc_feature 1..100: note = Synthetic
  source 1..100: mol_type = other DNA
atatttagcatgtcgctatgtgttctgggaaacttgacctaagtgtaaagttgagatttccttcaggtttatatagttctgtatgagaccactctttccc

SEQ ID NO: 709 - DNA, 143 bp, synthetic construct
  misc_feature 1..143: note = Synthetic
  source 1..143: mol_type = other DNA
ggccactccctctctgcgcgctcgctcgctcactgaggccgggcgaccaaaggtcgcccgacgcccgggctttgcccgggcggcctcagtgagcgagcgagcgcgcagagagggagtggccaactccatcactaggggttcct

SEQ ID NO: 710 - DNA, 137 bp, synthetic construct
  misc_feature 1..137: note = Synthetic
  source 1..137: mol_type = other DNA
aggaacccctagtgatggagttggccactccctctctgcgcgctcgctcgctcactgaggccgggcgaccaaaggtcgcccgacgcccgggctttgcccgggcggcctcagtgagcgagcgagcgcgcagagaggga

SEQ ID NO: 711 - protein, 1052 aa, Staphylococcus aureus
  REGION 1..1052: note = misc_feature - Staphylococcus aureus Cas9
KRNYILGLDIGITSVGYGIIDYETRDVIDAGVRLFKEANVENNEGRRSKRGARRLKRRRRHRIQRVKKLLFDYNLLTDHSELSGINPYEARVKGLSQKLSEEEFSAALLHLAKRRGVHNVNEVEEDTGNELSTKEQISRNSKALEEKYVAELQLERLKKDGEVRGSINRFKTSDYVKEAKQLLKVQKAYHQLDQSFIDTYIDLLETRRTYYEGPGEGSPFGWKDIKEWYEMLMGHCTYFPEELRSVKYAYNADLYNALNDLNNLVITRDENEKLEYYEKFQIIENVFKQKKKPTLKQIAKEILVNEEDIKGYRVTSTGKPEFTNLKVYHDIKDITARKEIIENAELLDQIAKILTIYQSSEDIQEELTNLNSELTQEEIEQISNLKGYTGTHNLSLKAINLILDELWHTNDNQIAIFNRLKLVPKKVDLSQQKEIPTTLVDDFILSPVVKRSFIQSIKVINAIIKKYGLPNDIIIELAREKNSKDAQKMINEMQKRNRQTNERIEEIIRTTGKENAKYLIEKIKLHDMQEGKCLYSLEAIPLEDLLNNPFNYEVDHIIPRSVSFDNSFNNKVLVKQEENSKKGNRTPFQYLSSSDSKISYETFKKHILNLAKGKGRISKTKKEYLLEERDINRFSVQKDFINRNLVDTRYATRGLMNLLRSYFRVNNLDVKVKSINGGFTSFLRRKWKFKKERNKGYKHHAEDALIIANADFIFKEWKKLDKAKKVMENQMFEEKQAESMPEIETEQEYKEIFITPHQIKHIKDFKDYKYSHRVDKKPNRELINDTLYSTRKDDKGNTLIVNNLNGLYDKDNDKLKKLINKSPEKLLMYHHDPQTYQKLKLIMEQYGDEKNPLYKYYEETGNYLTKYSKKDNGPVIKKIKYYGNKLNAHLDITDDYPNSRNKVVKLSLKPYRFDVYLDNGVYKFVTVKNLDVIKKENYYEVNSKCYEEAKKLKKISNQAEFIASFYNNDLIKINGELYRVIGVNNDLLNRIEVNMIDITYREYLENMNDKRPPRIIKTIASKTQSIKKYSTDILGNLYEVKSKKHPQIIKKG

SEQ ID NO: 712 - protein, 1053 aa, Staphylococcus lugdunensis
  REGION 1..1053: note = misc_feature - Staphylococcus lugdunensis Cas9
NQKFILGLDIGITSVGYGLIDYETKNIIDAGVRLFPEANVENNEGRRSKRGSRRLKRRRIHRLERVKKLLEDYNLLDQSQIPQSTNPYAIRVKGLSEALSKDELVIALLHIAKRRGIHKIDVIDSNDDVGNELSTKEQLNKNSKLLKDKFVCQIQLERMNEGQVRGEKNRFKTADIIKEIIQLLNVQKNFHQLDENFINKYIELVEMRREYFEGPGKGSPYGWEGDPKAWYETLMGHCTYFPDELRSVKYAYSADLFNALNDLNNLVIQRDGLSKLEYHEKYHIIENVFKQKKKPTLKQIANEINVNPEDIKGYRITKSGKPQFTEFKLYHDLKSVLFDQSILENEDVLDQIAEILTIYQDKDSIKSKLTELDILLNEEDKENIAQLTGYTGTHRLSLKCIRLVLEEQWYSSRNQMEIFTHLNIKPKKINLTAANKIPKAMIDEFILSPVVKRTFGQAINLINKIIEKYGVPEDIIIELARENNSKDKQKFINEMQKKNENTRKRINEIIGKYGNQNAKRLVEKIRLHDEQEGKCLYSLESIPLEDLLNNPNHYEVDHIIPRSVSFDNSYHNKVLVKQSENSKKSNLTPYQYFNSGKSKLSYNQFKQHILNLSKSQDRISKKKKEYLLEERDINKFEVQKEFINRNLVDTRYATRELTNYLKAYFSANNMNVKVKTINGSFTDYLRKVWKFKKERNHGYKHHAEDALIIANADFLFKENKKLKAVNSVLEKPEIETKQLDIQVDSEDNYSEMFIIPKQVQDIKDFRNFKYSHRVDKKPNRQLINDTLYSTRKKDNSTYIVQTIKDIYAKDNTTLKKQFDKSPEKFLMYQHDPRTFEKLEVIMKQYANEKNPLAKYHEETGEYLTKYSKKNNGPIVKSLKYIGNKLGSHLDVTHQFKSSTKKLVKLSIKPYRFDVYLTDKGYKFITISYLDVLKKDNYYYIPEQKYDKLKLGKAIDKNAKFIASFYKNDLIKLDGEIYKIIGVNSDTRNMIELDLPDIRYKEYCELNNIKGEPRIKKTIGKKVNSIEKLTTDVLGNVFTNTQYTKPQLLFKRGN

SEQ ID NO: 713 - protein, 7 aa, synthetic construct
  REGION 1..7: note = Synthetic
PKKKRKV

SEQ ID NO: 714 - protein, 16 aa, synthetic construct
  REGION 1..16: note = Synthetic
KRPAATKKAGQAKKKK

SEQ ID NO: 715 - protein, 1052 aa, synthetic construct
  REGION 1..1052: note = Synthetic
KRNYILGLDIGITSVGYGIIDYETRDVIDAGVRLFKEANVENNEGRRSKRGARRLKRRRRHRIQRVKKLLFDYNLLTDHSELSGINPYEARVKGLSQKLSEEEFSAALLHLAKRRGVHNVNEVEEDTGNELSTKEQISRNSKALEEKYVAELQLERLKKDGEVRGSINRFKTSDYVKEAKQLLKVQKAYHQLDQSFIDTYIDLLETRRTYYEGPGEGSPFGWKDIKEWYEMLMGHCTYFPEELRSVKYAYNADLYNALNDLNNLVITRDENEKLEYYEKFQIIENVFKQKKKPTLKQIAKEILVNEEDIKGYRVTSTGKPEFTNLKVYHDIKDITARKEIIENAELLDQIAKILTIYQSSEDIQEELTNLNSELTQEEIEQISNLKGYTGTHNLSLKAINLILDELWHTNDNQIAIFNRLKLVPKKVDLSQQKEIPTTLVDDFILSPVVKRSFIQSIKVINAIIKKYGLPNDIIIELAREKNSKDAQKMINEMQKRNRQTNERIEEIIRTTGKENAKYLIEKIKLHDMQEGKCLYSLEAIPLEDLLNNPFNYEVDHIIPRSVSFDNSFNNKVLVKQEENSKKGNRTPFQYLSSSDSKISYETFKKHILNLAKGKGRISKTKKEYLLEERDINRFSVQKDFINRNLVDTRYATRGLMNLLRSYFRVNNLDVKVKSINGGFTSFLRRKWKFKKERNKGYKHHAEDALIIANADFIFKEWKKLDKAKKVMENQMFEEKQAESMPEIETEQEYKEIFITPHQIKHIKDFKDYKYSHRVDKKPNRKLINDTLYSTRKDDKGNTLIVNNLNGLYDKDNDKLKKLINKSPEKLLMYHHDPQTYQKLKLIMEQYGDEKNPLYKYYEETGNYLTKYSKKDNGPVIKKIKYYGNKLNAHLDITDDYPNSRNKVVKLSLKPYRFDVYLDNGVYKFVTVKNLDVIKKENYYEVNSKCYEEAKKLKKISNQAEFIASFYKNDLIKINGELYRVIGVNNDLLNRIEVNMIDITYREYLENMNDKRPPHIIKTIASKTQSIKKYSTDILGNLYEVKSKKHPQIIKKG

SEQ ID NO: 716 - protein, 1052 aa, synthetic construct
  REGION 1..1052: note = Synthetic
KRNYILGLDIGITSVGYGIIDYETRDVIDAGVRLFKEANVENNEGRRSKRGARRLKRRRRHRIQRVKKLLFDYNLLTDHSELSGINPYEARVKGLSQKLSEEEFSAALLHLAKRRGVHNVNEVEEDTGNELSTKEQISRNSKALEEKYVAELQLERLKKDGEVRGSINRFKTSDYVKEAKQLLKVQKAYHQLDQSFIDTYIDLLETRRTYYEGPGEGSPFGWKDIKEWYEMLMGHCTYFPEELASVKYAYNADLYNALNDLNNLVITRDENEKLEYYEKFQIIENVFKQKKKPTLKQIAKEILVNEEDIKGYRVTSTGKPEFTNLKVYHDIKDITARKEIIENAELLDQIAKILTIYQSSEDIQEELTNLNSELTQEEIEQISNLKGYTGTHNLSLKAINLILDELWHTNDAQIAIFARLKLVPKKVDLSQQKEIPTTLVDDFILSPVVKRSFIQSIKVINAIIKKYGLPNDIIIELAREKNSKDAQKMINEMQKRNRQTNERIEEIIRTTGKENAKYLIEKIKLHDMQEGKCLYSLEAIPLEDLLNNPFNYEVDHIIPRSVSFDNSFNNKVLVKQEENSKKGNRTPFQYLSSSDSKISYETFKKHILNLAKGKGRISKTKKEYLLEERDINRFSVQKDFINRNLVDTRYATAGLMNLLRSYFRVNNLDVKVKSINGGFTSFLRRKWKFKKERNKGYKHHAEDALIIANADFIFKEWKKLDKAKKVMENQMFEEKQAESMPEIETEQEYKEIFITPHQIKHIKDFKDYKYSHRVDKKPNRELINDTLYSTRKDDKGNTLIVNNLNGLYDKDNDKLKKLINKSPEKLLMYHHDPQTYQKLKLIMEQYGDEKNPLYKYYEETGNYLTKYSKKDNGPVIKKIKYYGNKLNAHLDITDDYPNSRNKVVKLSLKPYRFDVYLDNGVYKFVTVKNLDVIKKENYYEVNSKCYEEAKKLKKISNQAEFIASFYNNDLIKINGELYRVIGVNNDLLNRIEVNMIDITYREYLENMNDKRPPRIIKTIASKTQSIKKYSTDILGNLYEVKSKKHPQIIKKG

SEQ ID NO: 717 - protein, 1052 aa, synthetic construct
  REGION 1..1052: note = Synthetic
KRNYILGLDIGITSVGYGIIDYETRDVIDAGVRLFKEANVENNEGRRSKRGARRLKRRRRHRIQRVKKLLFDYNLLTDHSELSGINPYEARVKGLSQKLSEEEFSAALLHLAKRRGVHNVNEVEEDTGNELSTKEQISRNSKALEEKYVAELQLERLKKDGEVRGSINRFKTSDYVKEAKQLLKVQKAYHQLDQSFIDTYIDLLETRRTYYEGPGEGSPFGWKDIKEWYEMLMGHCTYFPEELASVKYAYNADLYNALNDLNNLVITRDENEKLEYYEKFQIIENVFKQKKKPTLKQIAKEILVNEEDIKGYRVTSTGKPEFTNLKVYHDIKDITARKEIIENAELLDQIAKILTIYQSSEDIQEELTNLNSELTQEEIEQISNLKGYTGTHNLSLKAINLILDELWHTNDAQIAIFARLKLVPKKVDLSQQKEIPTTLVDDFILSPVVKRSFIQSIKVINAIIKKYGLPNDIIIELAREKNSKDAQKMINEMQKRNRQTNERIEEIIRTTGKENAKYLIEKIKLHDMQEGKCLYSLEAIPLEDLLNNPFNYEVDHIIPRSVSFDNSFNNKVLVKQEENSKKGNRTPFQYLSSSDSKISYETFKKHILNLAKGKGRISKTKKEYLLEERDINRFSVQKDFINRNLVDTRYATAGLMNLLRSYFRVNNLDVKVKSINGGFTSFLRRKWKFKKERNKGYKHHAEDALIIANADFIFKEWKKLDKAKKVMENQMFEEKQAESMPEIETEQEYKEIFITPHQIKHIKDFKDYKYSHRVDKKPNRKLINDTLYSTRKDDKGNTLIVNNLNGLYDKDNDKLKKLINKSPEKLLMYHHDPQTYQKLKLIMEQYGDEKNPLYKYYEETGNYLTKYSKKDNGPVIKKIKYYGNKLNAHLDITDDYPNSRNKVVKLSLKPYRFDVYLDNGVYKFVTVKNLDVIKKENYYEVNSKCYEEAKKLKKISNQAEFIASFYKNDLIKINGELYRVIGVNNDLLNRIEVNMIDITYREYLENMNDKRPPHIIKTIASKTQSIKKYSTDILGNLYEVKSKKHPQIIKKG

SEQ ID NO: 718 - protein, 1053 aa, synthetic construct
  REGION 1..1053: note = Synthetic: SluCas9-KH or SLUCAS9KH
NQKFILGLDIGITSVGYGLIDYETKNIIDAGVRLFPEANVENNEGRRSKRGSRRLKRRRIHRLERVKKLLEDYNLLDQSQIPQSTNPYAIRVKGLSEALSKDELVIALLHIAKRRGIHKIDVIDSNDDVGNELSTKEQLNKNSKLLKDKFVCQIQLERMNEGQVRGEKNRFKTADIIKEIIQLLNVQKNFHQLDENFINKYIELVEMRREYFEGPGKGSPYGWEGDPKAWYETLMGHCTYFPDELRSVKYAYSADLFNALNDLNNLVIQRDGLSKLEYHEKYHIIENVFKQKKKPTLKQIANEINVNPEDIKGYRITKSGKPQFTEFKLYHDLKSVLFDQSILENEDVLDQIAEILTIYQDKDSIKSKLTELDILLNEEDKENIAQLTGYTGTHRLSLKCIRLVLEEQWYSSRNQMEIFTHLNIKPKKINLTAANKIPKAMIDEFILSPVVKRTFGQAINLINKIIEKYGVPEDIIIELARENNSKDKQKFINEMQKKNENTRKRINEIIGKYGNQNAKRLVEKIRLHDEQEGKCLYSLESIPLEDLLNNPNHYEVDHIIPRSVSFDNSYHNKVLVKQSENSKKSNLTPYQYFNSGKSKLSYNQFKQHILNLSKSQDRISKKKKEYLLEERDINKFEVQKEFINRNLVDTRYATRELTNYLKAYFSANNMNVKVKTINGSFTDYLRKVWKFKKERNHGYKHHAEDALIIANADFLFKENKKLKAVNSVLEKPEIETKQLDIQVDSEDNYSEMFIIPKQVQDIKDFRNFKYSHRVDKKPNRKLINDTLYSTRKKDNSTYIVQTIKDIYAKDNTTLKKQFDKSPEKFLMYQHDPRTFEKLEVIMKQYANEKNPLAKYHEETGEYLTKYSKKNNGPIVKSLKYIGNKLGSHLDVTHQFKSSTKKLVKLSIKPYRFDVYLTDKGYKFITISYLDVLKKDNYYYIPEQKYDKLKLGKAIDKNAKFIASFYKNDLIKLDGEIYKIIGVNSDTRNMIELDLPDIRYKEYCELNNIKGEPHIKKTIGKKVNSIEKLTTDVLGNVFTNTQYTKPQLLFKRGN

SEQ ID NO: 719 - protein, 1053 aa, synthetic construct
  REGION 1..1053: note = Synthetic: SluCas9-HF
NQKFILGLDIGITSVGYGLIDYETKNIIDAGVRLFPEANVENNEGRRSKRGSRRLKRRRIHRLERVKKLLEDYNLLDQSQIPQSTNPYAIRVKGLSEALSKDELVIALLHIAKRRGIHKIDVIDSNDDVGNELSTKEQLNKNSKLLKDKFVCQIQLERMNEGQVRGEKNRFKTADIIKEIIQLLNVQKNFHQLDENFINKYIELVEMRREYFEGPGKGSPYGWEGDPKAWYETLMGHCTYFPDELASVKYAYSADLFNALNDLNNLVIQRDGLSKLEYHEKYHIIENVFKQKKKPTLKQIANEINVNPEDIKGYRITKSGKPQFTEFKLYHDLKSVLFDQSILENEDVLDQIAEILTIYQDKDSIKSKLTELDILLNEEDKENIAQLTGYTGTHRLSLKCIRLVLEEQWYSSRAQMEIFAHLNIKPKKINLTAANKIPKAMIDEFILSPVVKRTFGQAINLINKIIEKYGVPEDIIIELARENNSKDKQKFINEMQKKNENTRKRINEIIGKYGNQNAKRLVEKIRLHDEQEGKCLYSLESIPLEDLLNNPNHYEVDHIIPRSVSFDNSYHNKVLVKQSENSKKSNLTPYQYFNSGKSKLSYNQFKQHILNLSKSQDRISKKKKEYLLEERDINKFEVQKEFINRNLVDTRYATAELTNYLKAYFSANNMNVKVKTINGSFTDYLRKVWKFKKERNHGYKHHAEDALIIANADFLFKENKKLKAVNSVLEKPEIETKQLDIQVDSEDNYSEMFIIPKQVQDIKDFRNFKYSHRVDKKPNRQLINDTLYSTRKKDNSTYIVQTIKDIYAKDNTTLKKQFDKSPEKFLMYQHDPRTFEKLEVIMKQYANEKNPLAKYHEETGEYLTKYSKKNNGPIVKSLKYIGNKLGSHLDVTHQFKSSTKKLVKLSIKPYRFDVYLTDKGYKFITISYLDVLKKDNYYYIPEQKYDKLKLGKAIDKNAKFIASFYKNDLIKLDGEIYKIIGVNSDTRNMIELDLPDIRYKEYCELNNIKGEPRIKKTIGKKVNSIEKLTTDVLGNVFTNTQYTKPQLLFKRGN

SEQ ID NO: 720 - protein, 1053 aa, synthetic construct
  REGION 1..1053: note = Synthetic: SluCas9-HF-KH
NQKFILGLDIGITSVGYGLIDYETKNIIDAGVRLFPEANVENNEGRRSKRGSRRLKRRRIHRLERVKKLLEDYNLLDQSQIPQSTNPYAIRVKGLSEALSKDELVIALLHIAKRRGIHKIDVIDSNDDVGNELSTKEQLNKNSKLLKDKFVCQIQLERMNEGQVRGEKNRFKTADIIKEIIQLLNVQKNFHQLDENFINKYIELVEMRREYFEGPGKGSPYGWEGDPKAWYETLMGHCTYFPDELASVKYAYSADLFNALNDLNNLVIQRDGLSKLEYHEKYHIIENVFKQKKKPTLKQIANEINVNPEDIKGYRITKSGKPQFTEFKLYHDLKSVLFDQSILENEDVLDQIAEILTIYQDKDSIKSKLTELDILLNEEDKENIAQLTGYTGTHRLSLKCIRLVLEEQWYSSRAQMEIFAHLNIKPKKINLTAANKIPKAMIDEFILSPVVKRTFGQAINLINKIIEKYGVPEDIIIELARENNSKDKQKFINEMQKKNENTRKRINEIIGKYGNQNAKRLVEKIRLHDEQEGKCLYSLESIPLEDLLNNPNHYEVDHIIPRSVSFDNSYHNKVLVKQSENSKKSNLTPYQYFNSGKSKLSYNQFKQHILNLSKSQDRISKKKKEYLLEERDINKFEVQKEFINRNLVDTRYATAELTNYLKAYFSANNMNVKVKTINGSFTDYLRKVWKFKKERNHGYKHHAEDALIIANADFLFKENKKLKAVNSVLEKPEIETKQLDIQVDSEDNYSEMFIIPKQVQDIKDFRNFKYSHRVDKKPNRKLINDTLYSTRKKDNSTYIVQTIKDIYAKDNTTLKKQFDKSPEKFLMYQHDPRTFEKLEVIMKQYANEKNPLAKYHEETGEYLTKYSKKNNGPIVKSLKYIGNKLGSHLDVTHQFKSSTKKLVKLSIKPYRFDVYLTDKGYKFITISYLDVLKKDNYYYIPEQKYDKLKLGKAIDKNAKFIASFYKNDLIKLDGEIYKIIGVNSDTRNMIELDLPDIRYKEYCELNNIKGEPHIKKTIGKKVNSIEKLTTDVLGNVFTNTQYTKPQLLFKRGN

SEQ ID NO: 721 - skipped

SEQ ID NO: 722 - DNA, 27 bp, synthetic construct
  misc_feature 1..27: note = Synthetic
  source 1..27: mol_type = other DNA
ccggcagctaagaaaaagaaactggat

SEQ ID NO: 723 - DNA, 54 bp, synthetic construct
  misc_feature 1..54: note = Synthetic
  source 1..54: mol_type = other DNA
atgatggccccaaagaagaagcggaaggtcggtatccacggagtcccagcagcc

SEQ ID NO: 724-899 - skipped (176 entries)

SEQ ID NO: 900 - DNA, 77 bp, synthetic construct
  misc_feature 1..77: note = Synthetic: Scaffold ID: Wildtype
  source 1..77: mol_type = other DNA
gttttagtactctggaaacagaatctactgaaacaagacaatatgtcgtgtttatcccatcaatttattggtgggat

SEQ ID NO: 901 - DNA, 77 bp, synthetic construct
  misc_feature 1..77: note = Synthetic: Slu_v5
  source 1..77: mol_type = other DNA
gtttcagtactctggaaacagaatctactgaaacaagacaatatgtcgtgtttatcccatcaatttattggtgggat

SEQ ID NO: 902 - DNA, 77 bp, synthetic construct
  misc_feature 1..77: note = Synthetic: Slu_v5-1
  source 1..77: mol_type = other DNA
gtttggtaacctaggaaactagatcttaccaaacaagacaatatgtcgtgtttatcccatcaatttattggtgggat

SEQ ID NO: 903 - DNA, 77 bp, synthetic construct
  misc_feature 1..77: note = Synthetic: Slu_v5-2
  source 1..77: mol_type = other DNA
gtttcagtactctggaaacagaatctactgaaacaaggcaaaatgccgtgtttatcccatcaatttattggtgggat

SEQ ID NO: 904 - DNA, 77 bp, synthetic construct
  misc_feature 1..77: note = Synthetic: Slu_v5-3
  source 1..77: mol_type = other DNA
gtttcagtactctggaaacagaatctactgaaacaagacaatatgtcgcgcccatcccatcaatttattggtgggat

SEQ ID NO: 905 - DNA, 77 bp, synthetic construct
  misc_feature 1..77: note = Synthetic: Slu_v5-4
  source 1..77: mol_type = other DNA
gtttcagtactctggaaacagaatctactgaaacaagacaatatgtcgtgtttatgggttgaatttattcgacccat

SEQ ID NO: 906 - DNA, 77 bp, synthetic construct
  misc_feature 1..77: note = Synthetic: Slu_v5-5
  source 1..77: mol_type = other DNA
gtttggtaacctaggaaactagatcttaccaaacaaggcaaaatgccgtgtttatcccatcaatttattggtgggat

SEQ ID NO: 907 - DNA, 77 bp, synthetic construct
  misc_feature 1..77: note = Synthetic: Slu_v5-6
  source 1..77: mol_type = other DNA
gtttggtaacctaggaaactagatcttaccaaacaagacaatatgtcgcgcccatcccatcaatttattggtgggat

SEQ ID NO: 908 - DNA, 77 bp, synthetic construct
  misc_feature 1..77: note = Synthetic: Slu_v5-7
  source 1..77: mol_type = other DNA
gtttggtaacctaggaaactagatcttaccaaacaagacaatatgtcgtgtttatgggttgaatttattcgacccat

SEQ ID NO: 909 - DNA, 77 bp, synthetic construct
  misc_feature 1..77: note = Synthetic: Slu_v5-8
  source 1..77: mol_type = other DNA
gtttcagtactctggaaacagaatctactgaaacaaggcaaaatgccgcgcccatcccatcaatttattggtgggat

SEQ ID NO: 910 - DNA, 77 bp, synthetic construct
  misc_feature 1..77: note = Synthetic: Slu_v5-9
  source 1..77: mol_type = other DNA
gtttcagtactctggaaacagaatctactgaaacaaggcaaaatgccgtgtttatgggttgaatttattcgacccat

SEQ ID NO: 911 - DNA, 77 bp, synthetic construct
  misc_feature 1..77: note = Synthetic: Slu_v5-10
  source 1..77: mol_type = other DNA
gtttcagtactctggaaacagaatctactgaaacaagacaatatgtcgcgcccatgggttgaatttattcgacccat

SEQ ID NO: 912 - DNA, 77 bp, synthetic construct
  misc_feature 1..77: note = Synthetic: Slu_v5-11
  source 1..77: mol_type = other DNA
gtttggtaacctaggaaactagatcttaccaaacaaggcaaaatgccgcgcccatcccatcaatttattggtgggat

SEQ ID NO: 913 - DNA, 77 bp, synthetic construct
  misc_feature 1..77: note = Synthetic: Slu_v5-12
  source 1..77: mol_type = other DNA
gtttggtaacctaggaaactagatcttaccaaacaaggcaaaatgccgtgtttatgggttgaatttattcgacccat

SEQ ID NO: 914 - DNA, 77 bp, synthetic construct
  misc_feature 1..77: note = Synthetic: Slu_v5-13
  source 1..77: mol_type = other DNA
gtttggtaacctaggaaactagatcttaccaaacaagacaatatgtcgcgcccatgggttgaatttattcgacccat

SEQ ID NO: 915 - DNA, 77 bp, synthetic construct
  misc_feature 1..77: note = Synthetic: Slu_v5-14
  source 1..77: mol_type = other DNA
gtttcagtactctggaaacagaatctactgaaacaaggcaaaatgccgcgcccatgggttgaatttattcgacccat

SEQ ID NO: 916 - DNA, 77 bp, synthetic construct
  misc_feature 1..77: note = Synthetic: Slu_v5-15
  source 1..77: mol_type = other DNA
gtttggtaacctaggaaactagatcttaccaaacaaggcaaaatgccgcgcccatgggttgaatttattcgacccat

SEQ ID NO: 917 - DNA, 87 bp, synthetic construct
  misc_feature 1..87: note = Synthetic: Slu v4
  source 1..87: mol_type = other DNA
gtttcagtactctgtgctggaaacagcacagaatctactgaaacaagacaatatgtcgtgtttatcccatcaatttattggtgggat

SEQ ID NO: 918-7020 - skipped (6103 entries)

SEQ ID NO: 7021 - protein, 1057 aa, synthetic construct
  REGION 1..1057: note = Synthetic: sRGN1
MNQKFILGLDIGITSVGYGLIDYETKNIIDAGVRLFPEANVENNEGRRSKRGSRRLKRRRIHRLDRVKHLLAEYDLLDLTNIPKSTNPYQTRVKGLNEKLSKDELVIALLHIAKRRGIHNVDVAADKEETASDSLSTKDQINKNAKFLESRYVCELQKERLENEGHVRGVENRFLTKDIVREAKKIIDTQMQYYPEIDETFKEKYISLVETRREYFEGPGKGSPFGWEGNIKKWFEQMMGHCTYFPEELRSVKYSYSAELFNALNDLNNLVITRDEDAKLNYGEKFQIIENVFKQKKTPNLKQIAIEIGVHETEIKGYRVNKSGTPEFTEFKLYHDLKSIVFDKSILENEAILDQIAEILTIYQDEQSIKEELNKLPEILNEQDKAEIAKLIGYNGTHRLSLKCIHLINEELWQTSRNQMEIFNYLNIKPNKVDLSEQNKIPKDMVNDFILSPVVKRTFIQSINVINKVIEKYGIPEDIIIELARENNSDDRKKFINNLQKKNEATRKRINEIIGQTGNQNAKRIVEKIRLHDQQEGKCLYSLKDIPLEDLLRNPNNYDIDHIIPRSVSFDDSMHNKVLVRREQNAKKNNQTPYQYLTSGYADIKYSVFKQHVLNLAENKDRMTKKKREYLLEERDINKFEVQKEFINRNLVDTRYATRELTNYLKAYFSANNMNVKVKTINGSFTDYLRKVWKFKKERNHGYKHHAEDALIIANADFLFKENKKLKAVNSVLEKPEIETKQLDIQVDSEDNYSEMFIIPKQVQDIKDFRNFKYSHRVDKKPNRQLINDTLYSTRKKDNSTYIVQTIKDIYAKDNTTLKKQFDKSPEKFLMYQHDPRTFEKLEVIMKQYANEKNPLAKYHEETGEYLTKYSKKNNGPIVKSLKYIGNKLGSHLDVTHQFKSSTKKLVKLSIKPYRFDVYLTDKGYKFITISYLDVLKKDNYYYIPEQKYDKLKLGKAIDKNAKFIASFYKNDLIKLDGEIYKIIGVNSDTRNMIELDLPDIRYKEYCELNNIKGEPRIKKTIGKKVNSIEKLTTDVLGNVFTNTQYTKPQLLFKRGN

SEQ ID NO: 7022 - protein, 1053 aa, synthetic construct
  REGION 1..1053: note = Synthetic: sRGN2
MNQKFILGLDIGITSVGYGLIDYETKNIIDAGVRLFPEANVENNEGRRSKRGSRRLKRRRIHRLERVKSLLSEYKIISGLAPTNNQPYNIRVKGLTEQLTKDELAVALLHIAKRRGIHKIDVIDSNDDVGNELSTKEQLNKNSKLLKDKFVCQIQLERMNEGQVRGEKNRFKTADIIKEIIQLLNVQKNFHQLDENFINKYIELVEMRREYFEGPGQGSPFGWNGDLKKWYEMLMGHCTYFPQELRSVKYAYSADLFNALNDLNNLIIQRDNSEKLEYHEKYHIIENVFKQKKKPTLKQIAKEIGVNPEDIKGYRITKSGTPEFTEFKLYHDLKSVLFDQSILENEDVLDQIAEILTIYQDKDSIKSKLTELDILLNEEDKENIAQLTGYNGTHRLSLKCIRLVLEEQWYSSRNQMEIFTHLNIKPKKINLTAANKIPKAMIDEFILSPVVKRTFIQSINVINKVIEKYGIPEDIIIELARENNSDDRKKFINNLQKKNEATRKRINEIIGQTGNQNAKRIVEKIRLHDQQEGKCLYSLESIALMDLLNNPQNYEVDHIIPRSVAFDNSIHNKVLVKQIENSKKGNRTPYQYLNSSDAKLSYNQFKQHILNLSKSKDRISKKKKDYLLEERDINKFEVQKEFINRNLVDTRYATRELTSYLKAYFSANNMDVKVKTINGSFTNHLRKVWRFDKYRNHGYKHHAEDALIIANADFLFKENKKLKAVNSVLEKPEIETKQLDIQVDSEDNYSEMFIIPKQVQDIKDFRNFKYSHRVDKKPNRQLINDTLYSTRKKDNSTYIVQTIKDIYAKDNTTLKKQFDKSPEKFLMYQHDPRTFEKLEVIMKQYANEKNPLAKYHEETGEYLTKYSKKNNGPIVKSLKYIGNKLGSHLDVTHQFKSSTKKLVKLSIKPYRFDVYLTDKGYKFITISYLDVLKKDNYYYIPEQKYDKLKLGKAIDKNAKFIASFYKNDLIKLDGEIYKIIGVNSDTRNMIELDLPDIRYKEYCELNNIKGEPRIKKTIGKKVNSIEKLTTDVLGNVFTNTQYTKPQLLFKRGN

SEQ ID NO: 7023 - protein, 1057 aa, synthetic construct
  REGION 1..1057: note = Synthetic: sRGN3
MNQKFILGLDIGITSVGYGLIDYETKNIIDAGVRLFPEANVENNEGRRSKRGSRRLKRRRIHRLERVKLLLTEYDLINKEQIPTSNNPYQIRVKGLSEILSKDELAIALLHLAKRRGIHNVDVAADKEETASDSLSTKDQINKNAKFLESRYVCELQKERLENEGHVRGVENRFLTKDIVREAKKIIDTQMQYYPEIDETFKEKYISLVETRREYFEGPGQGSPFGWNGDLKKWYEMLMGHCTYFPQELRSVKYAYSADLFNALNDLNNLIIQRDNSEKLEYHEKYHIIENVFKQKKKPTLKQIAKEIGVNPEDIKGYRITKSGTPEFTSFKLFHDLKKVVKDHAILDDIDLLNQIAEILTIYQDKDSIVAELGQLEYLMSEADKQSISELTGYTGTHSLSLKCMNMIIDELWHSSMNQMEVFTYLNMRPKKYELKGYQRIPTDMIDDAILSPVVKRTFIQSINVINKVIEKYGIPEDIIIELARENNSDDRKKFINNLQKKNEATRKRINEIIGQTGNQNAKRIVEKIRLHDQQEGKCLYSLESIPLEDLLNNPNHYEVDHIIPRSVSFDNSYHNKVLVKQSENSKKSNLTPYQYFNSGKSKLSYNQFKQHILNLSKSQDRISKKKKEYLLEERDINKFEVQKEFINRNLVDTRYATRELTNYLKAYFSANNMNVKVKTINGSFTDYLRKVWKFKKERNHGYKHHAEDALIIANADFLFKENKKLKAVNSVLEKPEIETKQLDIQVDSEDNYSEMFIIPKQVQDIKDFRNFKYSHRVDKKPNRQLINDTLYSTRKKDNSTYIVQTIKDIYAKDNTTLKKQFDKSPEKFLMYQHDPRTFEKLEVIMKQYANEKNPLAKYHEETGEYLTKYSKKNNGPIVKSLKYIGNKLGSHLDVTHQFKSSTKKLVKLSIKPYRFDVYLTDKGYKFITISYLDVLKKDNYYYIPEQKYDKLKLGKAIDKNAKFIASFYKNDLIKLDGEIYKIIGVNSDTRNMIELDLPDIRYKEYCELNNIKGEPRIKKTIGKKVNSIEKLTTDVLGNVFTNTQYTKPQLLFKRGN

SEQ ID NO: 7024 - protein, 1057 aa, synthetic construct
  REGION 1..1057: note = Synthetic: sRGN3.1
MNQKFILGLDIGITSVGYGLIDYETKNIIDAGVRLFPEANVENNEGRRSKRGSRRLKRRRIHRLERVKLLLTEYDLINKEQIPTSNNPYQIRVKGLSEILSKDELAIALLHLAKRRGIHNVDVAADKEETASDSLSTKDQINKNAKFLESRYVCELQKERLENEGHVRGVENRFLTKDIVREAKKIIDTQMQYYPEIDETFKEKYISLVETRREYFEGPGQGSPFGWNGDLKKWYEMLMGHCTYFPQELRSVKYAYSADLFNALNDLNNLIIQRDNSEKLEYHEKYHIIENVFKQKKKPTLKQIAKEIGVNPEDIKGYRITKSGTPEFTSFKLFHDLKKVVKDHAILDDIDLLNQIAEILTIYQDKDSIVAELGQLEYLMSEADKQSISELTGYTGTHSLSLKCMNMIIDELWHSSMNQMEVFTYLNMRPKKYELKGYQRIPTDMIDDAILSPVVKRTFIQSINVINKVIEKYGIPEDIIIELARENNSDDRKKFINNLQKKNEATRKRINEIIGQTGNQNAKRIVEKIRLHDQQEGKCLYSLESIPLEDLLNNPNHYEVDHIIPRSVSFDNSYHNKVLVKQSENSKKSNLTPYQYFNSGKSKLSYNQFKQHILNLSKSQDRISKKKKEYLLEERDINKFEVQKEFINRNLVDTRYATRELTNYLKAYFSANNMNVKVKTINGSFTDYLRKVWKFKKERNHGYKHHAEDALIIANADFLFKENKKLKAVNSVLEKPEIETKQLDIQVDSEDNYSEMFIIPKQVQDIKDFRNFKYSHRVDKKPNRQLINDTLYSTRKKDNSTYIVQTIKDIYAKDNTTLKKQFDKSPEKFLMYQHDPRTFEKLEVIMKQYANEKNPLAKYHEETGEYLTKYSKKNNGPIVKSLKYIGNKLGSHLDVTHQFKSSTKKLVKLSIKNYRFDVYLTEKGYKFVTIAYLNVFKKDNYYYIPKDKYQELKEKKKIKDTDQFIASFYKNDLIKLNGDLYKIIGVNSDDRNIIELDYYDIKYKDYCEINNIKGEPRIKKTIGKKTESIEKFTTDVLGNLYLHSTEKAPQLIFKRGL

SEQ ID NO: 7025 - protein, 1057 aa, synthetic construct
  REGION 1..1057: note = Synthetic: sRGN3.2
MNQKFILGLDIGITSVGYGLIDYETKNIIDAGVRLFPEANVENNEGRRSKRGSRRLKRRRIHRLERVKLLLTEYDLINKEQIPTSNNPYQIRVKGLSEILSKDELAIALLHLAKRRGIHNVDVAADKEETASDSLSTKDQINKNAKFLESRYVCELQKERLENEGHVRGVENRFLTKDIVREAKKIIDTQMQYYPEIDETFKEKYISLVETRREYFEGPGQGSPFGWNGDLKKWYEMLMGHCTYFPQELRSVKYAYSADLFNALNDLNNLIIQRDNSEKLEYHEKYHIIENVFKQKKKPTLKQIAKEIGVNPEDIKGYRITKSGTPEFTSFKLFHDLKKVVKDHAILDDIDLLNQIAEILTIYQDKDSIVAELGQLEYLMSEADKQSISELTGYTGTHSLSLKCMNMIIDELWHSSMNQMEVFTYLNMRPKKYELKGYQRIPTDMIDDAILSPVVKRTFIQSINVINKVIEKYGIPEDIIIELARENNSDDRKKFINNLQKKNEATRKRINEIIGQTGNQNAKRIVEKIRLHDQQEGKCLYSLESIPLEDLLNNPNHYEVDHIIPRSVSFDNSYHNKVLVKQSENSKKSNLTPYQYFNSGKSKLSYNQFKQHILNLSKSQDRISKKKKEYLLEERDINKFEVQKEFINRNLVDTRYATRELTNYLKAYFSANNMNVKVKTINGSFTDYLRKVWKFKKERNHGYKHHAEDALIIANADFLFKENKKLKAVNSVLEKPEIETKQLDIQVDSEDNYSEMFIIPKQVQDIKDFRNFKFSHRVDKKPNRQLINDTLYSTRMKDEHDYIVQTITDIYGKDNTNLKKQFNKNPEKFLMYQNDPKTFEKLSIIMKQYSDEKNPLAKYYEETGEYLTKYSKKNNGPIVKKIKLLGNKVGNHLDVTNKYENSTKKLVKLSIKNYRFDVYLTEKGYKFVTIAYLNVFKKDNYYYIPKDKYQELKEKKKIKDTDQFIASFYKNDLIKLNGDLYKIIGVNSDDRNIIELDYYDIKYKDYCEINNIKGEPRIKKTIGKKTESIEKFTTDVLGNLYLHSTEKAPQLIFKRGL

SEQ ID NO: 7026 - protein, 1057 aa, synthetic construct
  REGION 1..1057: note = Synthetic: sRGN3.3
MNQKFILGLDIGITSVGYGLIDYETKNIIDAGVRLFPEANVENNEGRRSKRGSRRLKRRRIHRLERVKLLLTEYDLINKEQIPTSNNPYQIRVKGLSEILSKDELAIALLHLAKRRGIHNVDVAADKEETASDSLSTKDQINKNAKFLESRYVCELQKERLENEGHVRGVENRFLTKDIVREAKKIIDTQMQYYPEIDETFKEKYISLVETRREYFEGPGQGSPFGWNGDLKKWYEMLMGHCTYFPQELRSVKYAYSADLFNALNDLNNLIIQRDNSEKLEYHEKYHIIENVFKQKKKPTLKQIAKEIGVNPEDIKGYRITKSGTPEFTSFKLFHDLKKVVKDHAILDDIDLLNQIAEILTIYQDKDSIVAELGQLEYLMSEADKQSISELTGYTGTHSLSLKCMNMIIDELWHSSMNQMEVFTYLNMRPKKYELKGYQRIPTDMIDDAILSPVVKRTFIQSINVINKVIEKYGIPEDIIIELARENNSDDRKKFINNLQKKNEATRKRINEIIGQTGNQNAKRIVEKIRLHDQQEGKCLYSLESIPLEDLLNNPNHYEVDHIIPRSVSFDNSYHNKVLVKQSENSKKSNLTPYQYFNSGKSKLSYNQFKQHILNLSKSQDRISKKKKEYLLEERDINKFEVQKEFINRNLVDTRYATRELTSYLKAYFSANNMDVKVKTINGSFTNHLRKVWRFDKYRNHGYKHHAEDALIIANADFLFKENKKLQNTNKILEKPTIENNTKKVTVEKEEDYNNVFETPKLVEDIKQYRDYKFSHRVDKKPNRQLINDTLYSTRMKDEHDYIVQTITDIYGKDNTNLKKQFNKNPEKFLMYQNDPKTFEKLSIIMKQYSDEKNPLAKYYEETGEYLTKYSKKNNGPIVKKIKLLGNKVGNHLDVTNKYENSTKKLVKLSIKNYRFDVYLTEKGYKFVTIAYLNVFKKDNYYYIPKDKYQELKEKKKIKDTDQFIASFYKNDLIKLNGDLYKIIGVNSDDRNIIELDYYDIKYKDYCEINNIKGEPRIKKTIGKKTESIEKFTTDVLGNLYLHSTEKAPQLIFKRGL

SEQ ID NO: 7027 - protein, 1054 aa, synthetic construct
  REGION 1..1054: note = Synthetic: sRGN4
MNQKFILGLDIGITSVGYGLIDYETKNIIDAGVRLFPEANVENNEGRRSKRGSRRLKRRRIHRLERVKKLLEDYNLLDQSQIPQSTNPYAIRVKGLSEALSKDELVIALLHIAKRRGIHNINVSSEDEDASNELSTKEQINRNNKLLKDKYVCEVQLQRLKEGQIRGEKNRFKTTDILKEIDQLLKVQKDYHNLDIDFINQYKEIVETRREYFEGPGKGSPYGWEGDPKAWYETLMGHCTYFPDELRSVKYAYSADLFNALNDLNNLVIQRDGLSKLEYHEKYHIIENVFKQKKKPTLKQIANEINVNPEDIKGYRITKSGKPEFTSFKLFHDLKKVVKDHAILDDIDLLNQIAEILTIYQDKDSIVAELGQLEYLMSEADKQSISELTGYTGTHSLSLKCMNMIIDELWHSSMNQMEVFTYLNMRPKKYELKGYQRIPTDMIDDAILSPVVKRTFIQSINVINKVIEKYGIPEDIIIELARENNSDDRKKFINNLQKKNEATRKRINEIIGQTGNQNAKRIVEKIRLHDQQEGKCLYSLESIPLEDLLNNPNHYEVDHIIPRSVSFDNSYHNKVLVKQSENSKKSNLTPYQYFNSGKSKLSYNQFKQHILNLSKSQDRISKKKKEYLLEERDINKFEVQKEFINRNLVDTRYATRELTNYLKAYFSANNMNVKVKTINGSFTDYLRKVWKFKKERNHGYKHHAEDALIIANADFLFKENKKLKAVNSVLEKPEIETKQLDIQVDSEDNYSEMFIIPKQVQDIKDFRNFKYSHRVDKKPNRQLINDTLYSTRKKDNSTYIVQTIKDIYAKDNTTLKKQFDKSPEKFLMYQHDPRTFEKLEVIMKQYANEKNPLAKYHEETGEYLTKYSKKNNGPIVKSLKYIGNKLGSHLDVTHQFKSSTKKLVKLSIKPYRFDVYLTDKGYKFITISYLDVLKKDNYYYIPEQKYDKLKLGKAIDKNAKFIASFYKNDLIKLDGEIYKIIGVNSDTRNMIELDLPDIRYKEYCELNNIKGEPRIKKTIGKKVNSIEKLTTDVLGNVFTNTQYTKPQLLFKRGN

SEQ ID NO: 7028 - protein, 1051 aa, Staphylococcus hyicus
  REGION 1..1051: note = misc_feature - Staphylococcus hyicus Cas9 or ShyCas9
MNNYILGLDIGITSVGYGIVDSDTREIKDAGVRLFPEANVDNNEGRRSKRGARRLKRRRIHRLDRVKHLLAEYDLLDLTNIPKSTNPYQTRVKGLNEKLSKDELVIALLHIAKRRGIHNVNVMMDDNDSGNELSTKDQLKKNAKALSDKYVCELQLERFEQDYKVRGEKNRFKTEDFVREARKLLETQSKFFEIDQTFIMRYIELIETRREYFEGPGKGSPFGWEGNIKKWFEQMMGHCTYFPEELRSVKYSYSAELFNALNDLNNLVITRDEDAKLNYGEKFQIIENVFKQKKTPNLKQIAIEIGVHETEIKGYRVNKSGKPEFTQFKLYHDLKNIFKDPKYLNDIQLMDNIAEIITIYQDAESIIKELNQLPELLSEREKEKISALSGYSGTHRLSLKCINLLLDDLWESSLNQMELFTKLNLKPKKIDLSQQHKIPSKLVDDFILSPVVKRAFIQSIQVVNAIIDKYGLPEDIIIELARENNSDDRRKFLNQLQKQNEETRKQVEKVLREYGNDNAKRIVQKIKLHNMQEGKCLYSLKDIPLEDLLRNPHHYEVDHIIPRSVAFDNSMHNKVLVRADENSKKGNRTPYQYLNSSESSLSYNEFKQHILNLSKTKDRITKKKREYLLEERDINKFDVQKEFINRNLVDTRYATRELTSLLKAYFSANNLDVKVKTINGSFTNYLRKVWKFDKDRNKGYKHHAEDALIIANADFLFKHNKKLRNINKVLDAPSKEVDKKRVTVQSEDEYNQIFEDTQKAQAIKKFEIRKFSHRVDKKPNRQLINDTLYSTRNIDGIEYVVESIKDIYSVNNDKVKTKFKKDPHRLLMYRNDPQTFEKFEKVFKQYESEKNPFAKYYEETGEKIRKFSKTGQGPYINKIKYLRERLGRHCDVTNKYINSRNKIVQLKIYSYRFDIYQYGNNYKMITISYIDLEQKSNYYYISREKYEQKKKDKQIDDSYKFIGSFYKNDIINYNGEMYRVIGVNDSEKNKIQLDMIDISIKDYMELNNIKKTGVIYKTIGKSTTHIEKYTTDILGNLYKAAPPKKPQLIFK

SEQ ID NO: 7029 - protein, 1052 aa, Staphylococcus microti
  REGION 1..1052: note = misc_feature - Staphylococcus microti Cas9 or Smi Cas9
MEKDYILGLDIGIGSVGYGLIDYDTKSIIDAGVRLFPEANADNNLGRRAKRGARRLKRRRIHRLERVKSLLSEYKIISGLAPTNNQPYNIRVKGLTEQLTKDELAVALLHIAKRRGIHNVDVAADKEETASDSLSTKDQINKNAKFLESRYVCELQKERLENEGHVRGVENRFLTKDIVREAKKIIDTQMQYYPEIDETFKEKYISLVETRREYYEGPGKGSPYGWDADVKKWYQLMMGHCTYFPVEFRSVKYAYTADLYNALNDLNNLTIARDDNPKLEYHEKYHIIENVFKQKRNPTLKQIAKEIGVNDINISGYRVTKSGKPQFTSFKLFHDLKKVVKDHAILDDIDLLNQIAEILTIYQDKDSIVAELGQLEYLMSEADKQSISELTGYTGTHSLSLKCMNMIIDELWHSSMNQMEVFTYLNMRPKKYELKGYQRIPTDMIDDAILSPVVKRSFKQAIGVVNAIIKKYGLPKDIIIELARESNSAEKSRYLRAIQKKNEKTRERIEAIIKEYGNENAKGLVQKIKLHDAQEGKCLYSLKDIPLEDLLRNPNNYDIDHIIPRSVSFDDSMHNKVLVRREQNAKKNNQTPYQYLTSGYADIKYSVFKQHVLNLAENKDRMTKKKREYLLEERNINKYDVQKEFINRNLVDTRYTTRELTTLLKTYFTINNLDVKVKTINGSFTDFLRKRWGFKKNRDEGYKHHAEDALIIANADYLFKEHKLLKEIKDVSDLAGDERNSNVKDEDQYEEVFGGYFKIEDIKKYKIKKFSHRVDKKPNRQLINDTIYSTRVKDDKRYLINTLKNLYDKSNGDLKERMQKDPESLLMYHHDPQTFEKLKIVMSQYENEKNPLAKYFEETGQYLTKYAKHDNGPAIHKIKYYGNKLVEHLDITKNYHNPQNKVVQLSQKSFRFDVYQTDKGYKFISIAYLTLKNEKNYYAISQEKYDQLKSEKKISNNAVFIGSFYTSDIIEINNEKFRVIGVNSDKNNLIEVDRIDIRQKEFIELEEEKKNNRIKVTIGRKTTNIEKFHTDILGNMYKSKRPKAPQLVFKKG

SEQ ID NO: 7030 - protein, 1054 aa, Staphylococcus pasteuri
  REGION 1..1054: note = misc_feature - Staphylococcus pasteuri Cas9 or Spa Cas9
MKEKYILGLDLGITSVGYGIINFETKKIIDAGVRLFPEANVDNNEGRRSKRGSRRLKRRRIHRLERVKLLLTEYDLINKEQIPTSNNPYQIRVKGLSEILSKDELAIALLHLAKRRGIHNINVSSEDEDASNELSTKEQINRNNKLLKDKYVCEVQLQRLKEGQIRGEKNRFKTTDILKEIDQLLKVQKDYHNLDIDFINQYKEIVETRREYFEGPGQGSPFGWNGDLKKWYEMLMGHCTYFPQELRSVKYAYSADLFNALNDLNNLIIQRDNSEKLEYHEKYHIIENVFKQKKKPTLKQIAKEIGVNPEDIKGYRITKSGTPQFTEFKLYHDLKSIVFDKSILENEAILDQIAEILTIYQDEQSIKEELNKLPEILNEQDKAEIAKLIGYNGTHRLSLKCIHLINEELWQTSRNQMEIFNYLNIKPNKVDLSEQNKIPKDMVNDFILSPVVKRTFIQSINVINKVIEKYGIPEDIIIELARENNSDDRKKFINNLQKKNEATRKRINEIIGQTGNQNAKRIVEKIRLHDQQEGKCLYSLESIALMDLLNNPQNYEVDHIIPRSVAFDNSIHNKVLVKQIENSKKGNRTPYQYLNSSDAKLSYNQFKQHILNLSKSKDRISKKKKDYLLEERDINKFEVQKEFINRNLVDTRYATRELTSYLKAYFSANNMDVKVKTINGSFTNHLRKVWRFDKYRNHGYKHHAEDALIIANADFLFKENKKLQNTNKILEKPTIENNTKKVTVEKEEDYNNVFETPKLVEDIKQYRDYKFSHRVDKKPNRQLINDTLYSTRMKDEHDYIVQTITDIYGKDNTNLKKQFNKNPEKFLMYQNDPKTFEKLSIIMKQYSDEKNPLAKYYEETGEYLTKYSKKNNGPIVKKIKLLGNKVGNHLDVTNKYENSTKKLVKLSIKNYRFDVYLTEKGYKFVTIAYLNVFKKDNYYYIPKDKYQELKEKKKIKDTDQFIASFYKNDLIKLNGDLYKIIGVNSDDRNIIELDYYDIKYKDYCEINNIKGEPRIKKTIGKKTESIEKFTTDVLGNLYLHSTEKAPQLIFKRGL

SEQ ID NO: 7031 - protein, 1093 aa, synthetic construct
  REGION 1..1093: note = Synthetic: Cas12i1
MSNKEKNASETRKAYTTKMIPRSHDRMKLLGNFMDYLMDGTPIFFELWNQFGGGIDRDIISGTANKDKISDDLLLAVNWFKVMPINSKPQGVSPSNLANLFQQYSGSEPDIQAQEYFASNFDTEKHQWKDMRVEYERLLAELQLSRSDMHHDLKLMYKEKCIGLSLSTAHYITSVMFGTGAKNNRQTKHQFYSKVIQLLEESTQINSVEQLASIILKAGDCDSYRKLRIRCSRKGATPSILKIVQDYELGTNHDDEVNVPSLIANLKEKLGRFEYECEWKCMEKIKAFLASKVGPYYLGSYSAMLENALSPIKGMTTKNCKFVLKQIDAKNDIKYENEPFGKIVEGFFDSPYFESDTNVKWVLHPHHIGESNIKTLWEDLNAIHSKYEEDIASLSEDKKEKRIKVYQGDVCQTINTYCEEVGKEAKTPLVQLLRYLYSRKDDIAVDKIIDGITFLSKKHKVEKQKINPVIQKYPSFNFGNNSKLLGKIISPKDKLKHNLKCNRNQVDNYIWIEIKVLNTKTMRWEKHHYALSSTRFLEEVYYPATSENPPDALAARFRTKTNGYEGKPALSAEQIEQIRSAPVGLRKVKKRQMRLEAARQQNLLPRYTWGKDFNINICKRGNNFEVTLATKVKKKKEKNYKVVLGYDANIVRKNTYAAIEAHANGDGVIDYNDLPVKPIESGFVTVESQVRDKSYDQLSYNGVKLLYCKPHVESRRSFLEKYRNGTMKDNRGNNIQIDFMKDFEAIADDETSLYYFNMKYCKLLQSSIRNHSSQAKEYREEIFELLRDGKLSVLKLSSLSNLSFVMFKVAKSLIGTYFGHLLKKPKNSKSDVKAPPITDEDKQKADPEMFALRLALEEKRLNKVKSKKEVIANKIVAKALELRDKYGPVLIKGENISDTTKKGKKSSTNSFLMDWLARGVANKVKEMVMMHQGLEFVEVNPNFTSHQDPFVHKNPENTFRARYSRCTPSELTEKNRKEILSFLSDKPSKRPTNAYYNEGAMAFLATYGLKKNDVLGVSLEKFKQIMANILHQRSEDQLLFPSRGGMFYLATYKLDADATSVNWNGKQFWVCNADLVAAYNVGLVDIQKDFKKK

SEQ ID NO: 7032 - protein, 1054 aa, synthetic construct
  REGION 1..1054: note = Synthetic: Cas12i2
MSSAIKSYKSVLRPNERKNQLLKSTIQCLEDGSAFFFKMLQGLFGGITPEIVRFSTEQEKQQQDIALWCAVNWFRPVSQDSLTHTIASDNLVEKFEEYYGGTASDAIKQYFSASIGESYYWNDCRQQYYDLCRELGVEVSDLTHDLEILCREKCLAVATESNQNNSIISVLFGTGEKEDRSVKLRITKKILEAISNLKEIPKNVAPIQEIILNVAKATKETFRQVYAGNLGAPSTLEKFIAKDGQKEFDLKKLQTDLKKVIRGKSKERDWCCQEELRSYVEQNTIQYDLWAWGEMFNKAHTALKIKSTRNYNFAKQRLEQFKEIQSLNNLLVVKKLNDFFDSEFFSGEETYTICVHHLGGKDLSKLYKAWEDDPADPENAIVVLCDDLKNNFKKEPIRNILRYIFTIRQECSAQDILAAAKYNQQLDRYKSQKANPSVLGNQGFTWTNAVILPEKAQRNDRPNSLDLRIWLYLKLRHPDGRWKKHHIPFYDTRFFQEIYAAGNSPVDTCQFRTPRFGYHLPKLTDQTAIRVNKKHVKAAKTEARIRLAIQQGTLPVSNLKITEISATINSKGQVRIPVKFDVGRQKGTLQIGDRFCGYDQNQTASHAYSLWEVVKEGQYHKELGCFVRFISSGDIVSITENRGNQFDQLSYEGLAYPQYADWRKKASKFVSLWQITKKNKKKEIVTVEAKEKFDAICKYQPRLYKFNKEYAYLLRDIVRGKSLVELQQIRQEIFRFIEQDCGVTRLGSLSLSTLETVKAVKGIIYSYFSTALNASKNNPISDEQRKEFDPELFALLEKLELIRTRKKKQKVERIANSLIQTCLENNIKFIRGEGDLSTTNNATKKKANSRSMDWLARGVFNKIRQLAPMHNITLFGCGSLYTSHQDPLVHRNPDKAMKCRWAAIPVKDIGDWVLRKLSQNLRAKNIGTGEYYHQGVKEFLSHYELQDLEEELLKWRSDRKSNIPCWVLQNRLAEKLGNKEAVVYIPVRGGRIYFATHKVATGAVSIVFDQKQVWVCNADHVAAANIALTVKGIGEQSSDEENPDGSRIKLQLTS

SEQ ID NO: 7033-9000 - skipped (1968 entries)

SEQ ID NO: 9001 - DNA, 219 bp, synthetic construct
  misc_feature 1..219: note = Synthetic
  source 1..219: mol_type = other DNA
gagggcctatttcccatgattccttcatatttgcatatacgatacaaggctgttagagagataattggaattaatttgactgtaaacacaaagatataatttcttgggtagtttgcagttttaaaattatgttttaaaatggactatcatatgcttaccgtaacttgaaagtatttcgatttcttggctttatatatcttgtggaaaggacgaaacacc

SEQ ID NO: 9002 - DNA, 189 bp, synthetic construct
  misc_feature 1..189: note = Synthetic
  source 1..189: mol_type = other DNA
gagggcctatttcccatgattccttcatatttgcatatacgatacaaggctgttagagagataattggaattaatttgacgtttgcagttttaaaattatgttttaaaatggactatcatatgcttaccgtaacttgaaagtatttcgatttcttggctttatatatcttgtggaaaggacgaaacacc

SEQ ID NO: 9003 - DNA, 159 bp, synthetic construct
  misc_feature 1..159: note = Synthetic
  source 1..159: mol_type = other DNA
gagggcctatttcccatgattccttcatatttgcatatacgatacaaggctgttagagagataatattatgttttaaaatggactatcatatgcttaccgtaacttgaaagtatttcgatttcttggctttatatatcttgtggaaaggacgaaacacc

SEQ ID NO: 9004 - DNA, 129 bp, synthetic construct
  misc_feature 1..129: note = Synthetic
  source 1..129: mol_type = other DNA
gagggcctatttcccatgattccttcatatttgcatatacgatacaaggcggactatcatatgcttaccgtaacttgaaagtatttcgatttcttggctttatatatcttgtggaaaggacgaaacacc

SEQ ID NO: 9005 - skipped

SEQ ID NO: 9006 - DNA, 213 bp, synthetic construct
  misc_feature 1..213: note = Synthetic
  source 1..213: mol_type = other DNA
ctgcagtatttagcatgccccacccatctgcaaggcattctggatagtgtcaaaacagccggaaatcaagtccgtttatctcaaactttagcatttaaattagattttagttaaatttcctgctgaagctctagtacgataagcaacttgacctaagtgtaaagttgagacttccttcaggtttatatagcttgtgcgccgcttgggtacctc

SEQ ID NO: 9007 - DNA, 183 bp, synthetic construct
  misc_feature 1..183: note = Synthetic
  source 1..183: mol_type = other DNA
ctgcagtatttagcatgccccacccatctgcaaggcattctggatagtgtcaaaacagccggaaatcaagtccgtttatcttaaatttcctgctgaagctctagtacgataagcaacttgacctaagtgtaaagttgagacttccttcaggtttatatagcttgtgcgccgcttgggtacctc

SEQ ID NO: 9008 - DNA, 153 bp, synthetic construct
  misc_feature 1..153: note = Synthetic
  source 1..153: mol_type = other DNA
ctgcagtatttagcatgccccacccatctgcaaggcattctggatagtgtcaaaacagccggaaatagctctagtacgataagcaacttgacctaagtgtaaagttgagacttccttcaggtttatatagcttgtgcgccgcttgggtacctc

SEQ ID NO: 9009 - DNA, 123 bp, synthetic construct
  misc_feature 1..123: note = Synthetic
  source 1..123: mol_type = other DNA
ctgcagtatttagcatgccccacccatctgcaaggcattctggatagtgtcagcaacttgacctaagtgtaaagttgagacttccttcaggtttatatagcttgtgcgccgcttgggtacctc

SEQ ID NO: 9010-9013 - skipped (4 entries)

SEQ ID NO: 9014 - DNA, 3156 bp, synthetic construct
  misc_feature 1..3156: note = Synthetic
  source 1..3156: mol_type = other DNA
aagcgcaattacatcctgggcctggatatcggcatcacctccgtgggctacggcatcatcgactatgagacacgggatgtgatcgacgccggcgtgagactgttcaaggaggccaacgtggagaacaatgagggccggcggagcaagaggggagcaaggcgcctgaagcggagaaggcgccacagaatccagagagtgaagaagctgctgttcgattacaacctgctgaccgaccactccgagctgtctggcatcaatccttatgaggcccgggtgaagggcctgtcccagaagctgtctgaggaggagttttctgccgccctgctgcacctggcaaagaggagaggcgtgcacaacgtgaatgaggtggaggaggacaccggcaacgagctgagcacaaaggagcagatcagccgcaattccaaggccctggaggagaagtatgtggccgagctgcagctggagcggctgaagaaggatggcgaggtgaggggctccatcaatcgcttcaagacctctgactacgtgaaggaggccaagcagctgctgaaggtgcagaaggcctaccaccagctggatcagagctttatcgatacatatatcgacctgctggagaccaggcgcacatactatgagggaccaggagagggctcccccttcggctggaaggacatcaaggagtggtacgagatgctgatgggccactgcacctattttccagaggagctgagatccgtgaagtacgcctataacgccgatctgtacaacgccctgaatgacctgaacaacctggtcatcaccagggatgagaacgagaagctggagtactatgagaagttccagatcatcgagaacgtgttcaagcagaagaagaagcctacactgaagcagatcgccaaggagatcctggtgaacgaggaggacatcaagggctaccgcgtgaccagcacaggcaagccagagttcaccaatctgaaggtgtatcacgatatcaaggacatcacagcccggaaggagatcatcgagaacgccgagctgctggatcagatcgccaagatcctgaccatctatcagagctccgaggacatccaggaggagctgaccaacctgaatagcgagctgacacaggaggagatcgagcagatcagcaatctgaagggctacaccggcacacacaacctgtccctgaaggccatcaatctgatcctggatgagctgtggcacacaaacgacaatcagatcgccatctttaacaggctgaagctggtgccaaagaaggtggacctgagccagcagaaggagatcccaaccacactggtggacgatttcatcctgtcccccgtggtgaagcggagcttcatccagagcatcaaagtgatcaacgccatcatcaagaagtacggcctgcccaatgatatcatcatcgagctggccagggagaagaactctaaggacgcccagaagatgatcaatgagatgcagaagaggaaccgccagaccaatgagcggatcgaggagatcatcagaaccacaggcaaggagaacgccaagtacctgatcgagaagatcaagctgcacgatatgcaggagggcaagtgtctgtatagcctggaggccatccctctggaggacctgctgaacaatccattcaactacgaggtggatcacatcatcccccggagcgtgagcttcgacaattcctttaacaataaggtgctggtgaagcaggaggagaactctaagaagggcaataggacccctttccagtacctgtctagctccgattctaagatcagctacgagaccttcaagaagcacatcctgaatctggccaagggcaagggccgcatctctaagaccaagaaggagtacctgctggaggagcgggacatcaacagattcagcgtgcagaaggacttcatcaaccggaatctggtggacaccagatacgccacacgcggcctgatgaatctgctgcggtcctatttcagagtgaacaatctggatgtgaaggtgaagagcatcaacggcggcttcacctcctttctgcggagaaagtggaagtttaagaaggagagaaacaagggctataagcaccacgccgaggatgccctgatcatcgccaatgccgacttcatctttaaggagtggaagaagctggacaaggccaagaaagtgatggagaaccagatgttcgaggagaagcaggccgagagcatgcccgagatcgagaccgagcaggagtacaaggagattttcatcacacctcaccagatcaagcacatcaaggacttcaaggactacaagtattcccacagggtggataagaagcccaaccgcgagctgatcaatgacaccctgtattctacaaggaaggacgataagggcaataccctgatcgtgaacaatctgaacggcctgtacgacaaggataatgacaagctgaagaagctgatcaacaagagccccgagaagctgctgatgtaccaccacgatcctcagacatatcagaagctgaagctgatcatggagcagtacggcgacgagaagaacccactgtataagtactatgaggagaccggcaactacctgacaaagtattccaagaaggataatggccccgtgatcaagaagatcaagtactatggcaacaagctgaatgcccacctggacatcaccgacgattaccccaacagccggaataaggtggtgaagctgagcctgaagccatacaggttcgacgtgtacctggacaacggcgtgtataagtttgtgacagtgaagaatctggatgtgatcaagaaggagaactactatgaagtgaatagcaagtgctacgaggaggccaagaagctgaagaagatcagcaaccaggccgagttcatcgcctctttttacaacaatgacctgatcaagatcaatggcgagctgtatagagtgatcggcgtgaacaatgatctgctgaaccgcatcgaagtgaatatgatcgacatcacctaccgggagtatctggagaacatgaatgataagaggccccctcgcatcatcaagaccatcgcctctaagacacagagcatcaagaagtactctacagacatcctgggcaacctgtatgaggtgaagagcaagaagcaccctcagatcatcaagaagggc

What is claimed is:

1. A composition comprising one or more guide RNAs or a nucleic acid encoding one or more guide RNAs, wherein the guide RNAs comprise i) a guide sequence of Table 2; ii) at least 17, 18, 19, or 20 contiguous nucleotides of a guide sequence of Table 2; iii) a guide sequence that is at least 90% identical to a guide sequence of Table 2; or iv) any one of the guide sequence pairs shown in Tables 1B, and ID, optionally further comprising a SaCas9 or a nucleic acid encoding a SaCas9 (for SEQ ID NOs: 11-15 or 27-69) or a SluCas9 or a nucleic acid encoding a SluCas9 (for SEQ ID NOs 243-269).

2. A composition comprising a pair of guide RNAs or a nucleic acid encoding a pair of guide RNAs, wherein the pair of guide RNAs comprise a first and a second guide sequence, wherein the pair of guide sequences are selected from any of the following pairs:
a. SEQ ID NOs: 11 and 12; 11 and 13; 11 and 14; 11 and 15; 12 and 13; 12 and 14; 12 and 15; 13 and 14; 13 and 15; 14 and 15; 27 and 28; 27 and 29; 27 and 30; 27 and 31; 27 and 32; 27 and 33; 27 and 34; 27 and 35; 27 and 36; 27 and 37; 27 and 38; 27 and 39; 27 and 40; 27 and 41; 27 and 42; 27 and 43; 27 and 44; 27 and 45; 27 and 46; 27 and 47; 27 and 48; 27 and 53; 27 and 54; 27 and 55; 27 and 56; 27 and 57; 27 and 58; 27 and 59; 27 and 60; 27 and 61; 27 and 62; 27 and 63; 27 and 64; 27 and 65; 27 and 66; 27 and 67; 27 and 68; 27 and 69; 28 and 29; 28 and 30; 28 and 31; 28 and 32; 28 and 33; 28 and 34; 28 and 35; 28 and 36; 28 and 37; 28 and 38; 28 and 39; 28 and 40; 28 and 41; 28 and 42; 28 and 43; 28 and 44; 28 and 45; 28 and 46; 28 and 47; 28 and 48; 28 and 53; 28 and 54; 28 and 55; 28 and 56; 28 and 57; 28 and 58; 28 and 59; 28 and 60; 28 and 61; 28 and 62; 28 and 63; 28 and 64; 28 and 65; 28 and 66; 28 and 67; 28 and 68; 28 and 69; 29 and 30; 29 and 31; 29 and 32; 29 and 33; 29 and 34; 29 and 35; 29 and 36; 29 and 37; 29 and 38; 29 and 39; 29 and 40; 29 and 41; 29 and 42; 29 and 43; 29 and 44; 29 and 45; 29 and 46; 29 and 47; 29 and 48; 29 and 53; 29 and 54; 29 and 55; 29 and 56; 29 and 57; 29 and 58; 29 and 59; 29 and 60; 29 and 61; 29 and 62; 29 and 63; 29 and 64; 29 and 65; 29 and 66; 29 and 67; 29 and 68; 29 and 69; 30 and 31; 30 and 32; 30 and 33; 30 and 34; 30 and 35; 30 and 36; 30 and 37; 30 and 38; 30 and 39; 30 and 40; 30 and 41; 30 and 42; 30 and 43; 30 and 44; 30 and 45; 30 and 46; 30 and 47; 30 and 48; 30 and 53; 30 and 54; 30 and 55; 30 and 56; 30 and 57; 30 and 58; 30 and 59; 30 and 60; 30 and 61; 30 and 62; 30 and 63; 30 and 64; 30 and 65; 30 and 66; 30 and 67; 30 and 68; 30 and 69; 31 and 32; 31 and 33; 31 and 34; 31 and 35; 31 and 36; 31 and 37; 31 and 38; 31 and 39; 31 and 40; 31 and 41; 31 and 42; 31 and 43; 31 and 44; 31 and 45; 31 and 46; 31 and 47; 31 and 48; 31 and 53; 31 and 54; 31 and 55; 31 and 56; 31 and 57; 31 and 58; 31 and 59; 31 and 60; 31 and 61; 31 and 62; 31 and 63; 31 and 64; 31 and 65; 31 and 66; 31 and 67; 31 and 68; 31 and 69; 32 and 33; 32 and 34; 32 and 35; 32 and 36; 32 and 37; 32 and 38; 32 and 39; 32 and 40; 32 and 41; 32 and 42; 32 and 43; 32 and 44; 32 and 45; 32 and 46; 32 and 47; 32 and 48; 32 and 53; 32 and 54; 32 and 55; 32 and 56; 32 and 57; 32 and 58; 32 and 59; 32 and 60; 32 and 61; 32 and 62; 32 and 63; 32 and 64; 32 and 65; 32 and 66; 32 and 67; 32 and 68; 32 and 69; 33 and 34; 33 and 35; 33 and 36; 33 and 37; 33 and 38; 33 and 39; 33 and 40; 33 and 41; 33 and 42; 33 and 43; 33 and 44; 33 and 45; 33 and 46; 33 and 47; 33 and 48; 33 and 53; 33 and 54; 33 and 55; 33 and 56; 33 and 57; 33 and 58; 33 and 59; 33 and 60; 33 and 61; 33 and 62; 33 and 63; 33 and 64; 33 and 65; 33 and 66; 33 and 67; 33 and 68; 33 and 69; 34 and 35; 34 and 36; 34 and 37; 34 and 38; 34 and 39; 34 and 40; 34 and 41; 34 and 42; 34 and 43; 34 and 44; 34 and 45; 34 and 46; 34 and 47; 34 and 48; 34 and 53; 34 and 54; 34 and 55; 34 and 56; 34 and 57; 34 and 58; 34 and 59; 34 and 60; 34 and 61; 34 and 62; 34 and 63; 34 and 64; 34 and 65; 34 and 66; 34 and 67; 34 and 68; 34 and 69; 35 and 36; 35 and 37; 35 and 38; 35 and 39; 35 and 40; 35 and 41; 35 and 42; 35 and 43; 35 and 44; 35 and 45; 35 and 46; 35 and 47; 35 and 48; 35 and 53; 35 and 54; 35 and 55; 35 and 56; 35 and 57; 35 and 58; 35 and 59; 35 and 60; 35 and 61; 35 and 62; 35 and 63; 35 and 64; 35 and 65; 35 and 66; 35 and 67; 35 and 68; 35 and 69; 36 and 37; 36 and 38; 36 and 39; 36 and 40; 36 and 41; 36 and 42; 36 and 43; 36 and 44; 36 and 45; 36 and 46; 36 and 47; 36 and 48; 36 and 53; 36 and 54; 36 and 55; 36 and 56; 36 and 57; 36 and 58; 36 and 59; 36 and 60; 36 and 61; 36 and 62; 36 and 63; 36 and 64; 36 and 65; 36 and 66; 36 and 67; 36 and 68; 36 and 69; 37 and 38; 37 and 39; 37 and 40; 37 and 41; 37 and 42; 37 and 43; 37 and 44; 37 and 45; 37 and 46; 37 and 47; 37 and 48; 37 and 53; 37 and 54; 37 and 55; 37 and 56; 37 and 57; 37 and 58; 37 and 59; 37 and 60; 37 and 61; 37 and 62; 37 and 63; 37 and 64; 37 and 65; 37 and 66; 37 and 67; 37 and 68; 37 and 69; 38 and 39; 38 and 40; 38 and 41; 38 and 42; 38 and 43; 38 and 44; 38 and 45; 38 and 46; 38 and 47; 38 and 48; 38 and 53; 38 and 54; 38 and 55; 38 and 56; 38 and 57; 38 and 58; 38 and 59; 38 and 60; 38 and 61; 38 and 62; 38 and 63; 38 and 64; 38 and 65; 38 and 66; 38 and 67; 38 and 68; 38 and 69; 39 and 40; 39 and 41; 39 and 42; 39 and 43; 39 and 44; 39 and 45; 39 and 46; 39 and 47; 39 and 48; 39 and 53; 39 and 54; 39 and 55; 39 and 56; 39 and 57; 39 and 58; 39 and 59; 39 and 60; 39 and 61; 39 and 62; 39 and 63; 39 and 64; 39 and 65; 39 and 66; 39 and 67; 39 and 68; 39 and 69; 40 and 41; 40 and 42; 40 and 43; 40 and 44; 40 and 45; 40 and 46; 40 and 47; 40 and 48; 40 and 53; 40 and 54; 40 and 55; 40 and 56; 40 and 57; 40 and 58; 40 and 59; 40 and 60; 40 and 61; 40 and 62; 40 and 63; 40 and 64; 40 and 65; 40 and 66; 40 and 67; 40 and 68; 40 and 69; 41 and 42; 41 and 43; 41 and 44; 41 and 45; 41 and 46; 41 and 47; 41 and 48; 41 and 53; 41 and 54; 41 and 55; 41 and 56; 41 and 57; 41 and 58; 41 and 59; 41 and 60; 41 and 61; 41 and 62; 41 and 63; 41 and 64; 41 and 65; 41 and 66; 41 and 67; 41 and 68; 41 and 69; 42 and 43; 42 and 44; 42 and 45; 42 and 46; 42 and 47; 42 and 48; 42 and 53; 42 and 54; 42 and 55; 42 and 56; 42 and 57; 42 and 58; 42 and 59; 42 and 60; 42 and 61; 42 and 62; 42 and 63; 42 and 64; 42 and 65; 42 and 66; 42 and 67; 42 and 68; 42 and 69; 43 and 44; 43 and 45; 43 and 46; 43 and 47; 43 and 48; 43 and 53; 43 and 54; 43 and 55; 43 and 56; 43 and 57; 43 and 58; 43 and 59; 43 and 60; 43 and 61; 43 and 62; 43 and 63; 43 and 64; 43 and 65; 43 and 66; 43 and 67; 43 and 68; 43 and 69; 44 and 45; 44 and 46; 44 and 47; 44 and 48; 44 and 53; 44 and 54; 44 and 55; 44 and 56; 44 and 57; 44 and 58; 44 and 59; 44 and 60; 44 and 61; 44 and 62; 44 and 63; 44 and 64; 44 and 65; 44 and 66; 44 and 67; 44 and 68; 44 and 69; 45 and 46; 45 and 47; 45 and 48; 45 and 53; 45 and 54; 45 and 55; 45 and 56; 45 and 57; 45 and 58; 45 and 59; 45 and 60; 45 and 61; 45 and 62; 45 and 63; 45 and 64; 45 and 65; 45 and 66; 45 and 67; 45 and 68; 45 and 69; 46 and 47; 46 and 48; 46 and 53; 46 and 54; 46 and 55; 46 and 56; 46 and 57; 46 and 58; 46 and 59; 46 and 60; 46 and 61; 46 and 62; 46 and 63; 46 and 64; 46 and 65; 46 and 66; 46 and 67; 46 and 68; 46 and 69; 47 and 48; 47 and 53; 47 and 54; 47 and 55; 47 and 56; 47 and 57; 47 and 58; 47 and 59; 47 and 60; 47 and 61; 47 and 62; 47 and 63; 47 and 64; 47 and 65; 47 and 66; 47 and 67; 47 and 68; 47 and 69; 48 and 53; 48 and 54; 48 and 55; 48 and 56; 48 and 57; 48 and 58; 48 and 59; 48 and 60; 48 and 61; 48 and 62; 48 and 63; 48 and 64; 48 and 65; 48 and 66; 48 and 67; 48 and 68; 48 and 69; 53 and 54; 53 and 55; 53 and 56; 53 and 57; 53 and 58; 53 and 59; 53 and 60; 53 and 61; 53 and 62; 53 and 63; 53 and 64; 53 and 65; 53 and 66; 53 and 67; 53 and 68; 53 and 69; 54 and 55; 54 and 56; 54 and 57; 54 and 58; 54 and 59; 54 and 60; 54 and 61; 54 and 62; 54 and 63; 54 and 64; 54 and 65; 54 and 66; 54 and 67; 54 and 68; 54 and 69; 55 and 56; 55 and 57; 55 and 58; 55 and 59; 55 and 60; 55 and 61; 55 and 62; 55 and 63; 55 and 64; 55 and 65; 55 and 66; 55 and 67; 55 and 68; 55 and 69; 56 and 57; 56 and 58; 56 and 59; 56 and 60; 56 and 61; 56 and 62; 56 and 63; 56 and 64; 56 and 65; 56 and 66; 56 and 67; 56 and 68; 56 and 69; 57 and 58; 57 and 59; 57 and 60; 57 and 61; 57 and 62; 57 and 63; 57 and 64; 57 and 65; 57 and 66; 57 and 67; 57 and 68; 57 and 69; 58 and 59; 58 and 60; 58 and 61; 58 and 62; 58 and 63; 58 and 64; 58 and 65; 58 and 66; 58 and 67; 58 and 68; 58 and 69; 59 and 60; 59 and 61; 59 and 62; 59 and 63; 59 and 64; 59 and 65; 59 and 66; 59 and 67; 59 and 68; 59 and 69; 60 and 61; 60 and 62; 60 and 63; 60 and 64; 60 and 65; 60 and 66; 60 and 67; 60 and 68; 60 and 69; 61 and 62; 61 and 63; 61 and 64; 61 and 65; 61 and 66; 61 and 67; 61 and 68; 61 and 69; 62 and 63; 62 and 64; 62 and 65; 62 and 66; 62 and 67; 62 and 68; 62 and 69; 63 and 64; 63 and 65; 63 and 66; 63 and 67; 63 and 68; 63 and 69; 64 and 65; 64 and 66; 64 and 67; 64 and 68; 64 and 69; 65 and 66; 65 and 67; 65 and 68; 65 and 69; 66 and 67; 66 and 68; 66 and 69; 67 and 68; 67 and 69; or 68 and 69;
b. SEQ ID NOs: 243 and 244; 243 and 245; 243 and 246; 243 and 247; 243 and 248; 243 and 249; 243 and 250; 243 and 251; 243 and 252; 243 and 253; 243 and 254; 243 and 255; 243 and 256; 243 and 257; 243 and 258; 243 and 259; 243 and 260; 243 and 261; 243 and 262; 243 and 263; 243 and 264; 243 and 265; 243 and 266; 243 and 267; 243 and 268; 243 and 269; 244 and 245; 244 and 246; 244 and 247; 244 and 248; 244 and 249; 244 and 250; 244 and 251; 244 and 252; 244 and 253; 244 and 254; 244 and 255; 244 and 256; 244 and 257; 244 and 258; 244 and 259; 244 and 260; 244 and 261; 244 and 262; 244 and 263; 244 and 264; 244 and 265; 244 and 266; 244 and 267; 244 and 268; 244 and 269; 245 and 246; 245 and 247; 245 and 248; 245 and 249; 245 and 250; 245 and 251; 245 and 252; 245 and 253; 245 and 254; 245 and 255; 245 and 256; 245 and 257; 245 and 258; 245 and 259; 245 and 260; 245 and 261; 245 and 262; 245 and 263; 245 and 264; 245 and 265; 245 and 266; 245 and 267; 245 and 268; 245 and 269; 246 and 247; 246 and 248; 246 and 249; 246 and 250; 246 and 251; 246 and 252; 246 and 253; 246 and 254; 246 and 255; 246 and 256; 246 and 257; 246 and 258; 246 and 259; 246 and 260; 246 and 261; 246 and 262; 246 and 263; 246 and 264; 246 and 265; 246 and 266; 246 and 267; 246 and 268; 246 and 269; 247 and 248; 247 and 249; 247 and 250; 247 and 251; 247 and 252; 247 and 253; 247 and 254; 247 and 255; 247 and 256; 247 and 257; 247 and 258; 247 and 259; 247 and 260; 247 and 261; 247 and 262; 247 and 263; 247 and 264; 247 and 265; 247 and 266; 247 and 267; 247 and 268; 247 and 269; 248 and 249; 248 and 250; 248 and 251; 248 and 252; 248 and 253; 248 and 254; 248 and 255; 248 and 256; 248 and 257; 248 and 258; 248 and 259; 248 and 260; 248 and 261; 248 and 262; 248 and 263; 248 and 264; 248 and 265; 248 and 266; 248 and 267; 248 and 268; 248 and 269; 249 and 250; 249 and 251; 249 and 252; 249 and 253; 249 and 254; 249 and 255; 249 and 256; 249 and 257; 249 and 258; 249 and 259; 249 and 260; 249 and 261; 249 and 262; 249 and 263; 249 and 264; 249 and 265; 249 and 266; 249 and 267; 249 and 268; 249 and 269; 250 and 251; 250 and 252; 250 and 253; 250 and 254; 250 and 255; 250 and 256; 250 and 257; 250 and 258; 250 and 259; 250 and 260; 250 and 261; 250 and 262; 250 and 263; 250 and 264; 250 and 265; 250 and 266; 250 and 267; 250 and 268; 250 and 269; 251 and 252; 251 and 253; 251 and 254; 251 and 255; 251 and 256; 251 and 257; 251 and 258; 251 and 259; 251 and 260; 251 and 261; 251 and 262; 251 and 263; 251 and 264; 251 and 265; 251 and 266; 251 and 267; 251 and 268; 251 and 269; 252 and 253; 252 and 254; 252 and 255; 252 and 256; 252 and 257; 252 and 258; 252 and 259; 252 and 260; 252 and 261; 252 and 262; 252 and 263; 252 and 264; 252 and 265; 252 and 266; 252 and 267; 252 and 268; 252 and 269; 253 and 254; 253 and 255; 253 and 256; 253 and 257; 253 and 258; 253 and 259; 253 and 260; 253 and 261; 253 and 262; 253 and 263; 253 and 264; 253 and 265; 253 and 266; 253 and 267; 253 and 268; 253 and 269; 254 and 255; 254 and 256; 254 and 257; 254 and 258; 254 and 259; 254 and 260; 254 and 261; 254 and 262; 254 and 263; 254 and 264; 254 and 265; 254 and 266; 254 and 267; 254 and 268; 254 and 269; 255 and 256; 255 and 257; 255 and 258; 255 and 259; 255 and 260; 255 and 261; 255 and 262; 255 and 263; 255 and 264; 255 and 265; 255 and 266; 255 and 267; 255 and 268; 255 and 269; 256 and 257; 256 and 258; 256 and 259; 256 and 260; 256 and 261; 256 and 262; 256 and 263; 256 and 264; 256 and 265; 256 and 266; 256 and 267; 256 and 268; 256 and 269; 257 and 258; 257 and 259; 257 and 260; 257 and 261; 257 and 262; 257 and 263; 257 and 264; 257 and 265; 257 and 266; 257 and 267; 257 and 268; 257 and 269; 258 and 259; 258 and 260; 258 and 261; 258 and 262; 258 and 263; 258 and 264; 258 and 265; 258 and 266; 258 and 267; 258 and 268; 258 and 269; 259 and 260; 259 and 261; 259 and 262; 259 and 263; 259 and 264; 259 and 265; 259 and 266; 259 and 267; 259 and 268; 259 and 269; 260 and 261; 260 and 262; 260 and 263; 260 and 264; 260 and 265; 260 and 266; 260 and 267; 260 and 268; 260 and 269; 261 and 262; 261 and 263; 261 and 264; 261 and 265; 261 and 266; 261 and 267; 261 and 268; 261 and 269; 262 and 263; 262 and 264; 262 and 265; 262 and 266; 262 and 267; 262 and 268; 262 and 269; 263 and 264; 263 and 265; 263 and 266; 263 and 267; 263 and 268; 263 and 269; 264 and 265; 264 and 266; 264 and 267; 264 and 268; 264 and 269; 265 and 266; 265 and 267; 265 and 268; 265 and 269; 266 and 267; 266 and 268; 266 and 269; 267 and 268; 267 and 269; or 268 and 269;
c. SEQ ID NOs: 28 and 57; 31 and 57; 31 and 46; 32 and 69; 33 and 57; 33 and 69; 34 and 57; 36 and 69; 37 and 69; 37 and 46; 39 and 46; 40 and 46; 46 and 35; 46 and 62; 46 and 65; 46 and 67; 47 and 57; 48 and 57; 49 and 57; 51 and 57; 53 and 46; 54 and 46; 55 and 46; 58 and 46; 59 and 46; 60 and 46; 61 and 69; or 69 and 30;
d. SEQ ID NOs: 243 and 252; 245 and 252; 252 and 253; 252 and 254; 252 and 256; 252 and 257; 252 and 258; 252 and 262; 252 and 264; 252 and 265; or 252 and 266; and
e. SEQ ID NOs: 269 and 247; 252 and 254; 269 and 249; 252 and 262; or 252 and 264.

3. A composition comprising: one or more nucleic acid molecules encoding
a. a SaCas9 or SluCas9; and
b. a pair of guide sequences, wherein the pair of guide sequences is selected from the guide sequence pairs of: SEQ ID NO: 11 and SEQ ID NO: 12; SEQ ID NO: 11 and SEQ ID NO: 13; SEQ ID NO: 11 and SEQ ID NO: 14; SEQ ID NO: 11 and SEQ ID NO: 15; SEQ ID NO: 12 and SEQ ID NO: 13; SEQ ID NO: 12 and SEQ ID NO: 14; SEQ ID NO: 12 and SEQ ID NO: 15; SEQ ID NO: 13 and SEQ ID NO: 14; SEQ ID NO: 13 and SEQ ID NO: 15; SEQ ID NO: 14 and SEQ ID NO: 15; SEQ ID NO: 27 and SEQ ID NO: 28; SEQ ID NO: 27 and SEQ ID NO: 29; SEQ ID NO: 27 and SEQ ID NO: 30; SEQ ID NO: 27 and SEQ ID NO: 31; SEQ ID NO: 27 and SEQ ID NO: 32; SEQ ID NO: 27 and SEQ ID NO: 33; SEQ ID NO: 27 and SEQ ID NO: 34; SEQ ID NO: 27 and SEQ ID NO: 35; SEQ ID NO: 27 and SEQ ID NO: 36; SEQ ID NO: 27 and SEQ ID NO: 37; SEQ ID NO: 27 and SEQ ID NO: 38; SEQ ID NO: 27 and SEQ ID NO: 39; SEQ ID NO: 27 and SEQ ID NO: 40; SEQ ID NO: 27 and SEQ ID NO: 41; SEQ ID NO: 27 and SEQ ID NO: 42; SEQ ID NO: 27 and SEQ ID NO: 43; SEQ ID NO: 27 and SEQ ID NO: 44; SEQ ID NO: 27 and SEQ ID NO: 45; SEQ ID NO: 27 and SEQ ID NO: 46; SEQ ID NO: 27 and SEQ ID NO: 47; SEQ ID NO: 27 and SEQ ID NO: 48; SEQ ID NO: 27 and SEQ ID NO: 53; SEQ ID NO: 27 and SEQ ID NO: 54; SEQ ID NO: 27 and SEQ ID NO: 55; SEQ ID NO: 27 and SEQ ID NO: 56; SEQ ID NO: 27 and SEQ ID NO: 57; SEQ ID NO: 27 and SEQ ID NO: 58; SEQ ID NO: 27 and SEQ ID NO: 59; SEQ ID NO: 27 and SEQ ID NO: 60; SEQ ID NO: 27 and SEQ ID NO: 61; SEQ ID NO: 27 and SEQ ID NO: 62; SEQ ID NO: 27 and SEQ ID NO: 63; SEQ ID NO: 27 and SEQ ID NO: 64; SEQ ID NO: 27 and SEQ ID NO: 65; SEQ ID NO: 27 and SEQ ID NO: 66; SEQ ID NO: 27 and SEQ ID NO: 67; SEQ ID NO: 27 and SEQ ID NO: 68; SEQ ID NO: 27 and SEQ ID NO: 69; SEQ ID NO: 28 and SEQ ID NO: 29; SEQ ID NO: 28 and SEQ ID NO: 30; SEQ ID NO: 28 and SEQ ID NO: 31; SEQ ID NO: 28 and SEQ ID NO: 32; SEQ ID NO: 28 and SEQ ID NO: 33; SEQ ID NO: 28 and SEQ ID NO: 34; SEQ ID NO: 28 and SEQ ID NO: 35; SEQ ID NO: 28 and SEQ ID NO: 36; SEQ ID NO: 28 and SEQ ID NO: 37; SEQ ID NO: 28 and SEQ ID NO: 38; SEQ ID NO: 28 and SEQ ID NO: 39; SEQ ID NO: 28 and SEQ ID NO: 40; SEQ ID NO: 28 and SEQ ID NO: 41; SEQ ID NO: 28 and SEQ ID NO: 42; SEQ ID NO: 28 and SEQ ID NO: 43; SEQ ID NO: 28 and SEQ ID NO: 44; SEQ ID NO: 28 and SEQ ID NO: 45; SEQ ID NO: 28 and SEQ ID NO: 46; SEQ ID NO: 28 and SEQ ID NO: 47; SEQ ID NO: 28 and SEQ ID NO: 48; SEQ ID NO: 28 and SEQ ID NO: 53; SEQ ID NO: 28 and SEQ ID NO: 54; SEQ ID NO: 28 and SEQ ID NO: 55; SEQ ID NO: 28 and SEQ ID NO: 56; SEQ ID NO: 28 and SEQ ID NO: 57; SEQ ID NO: 28 and SEQ ID NO: 58; SEQ ID NO: 28 and SEQ ID NO: 59; SEQ ID NO: 28 and SEQ ID NO: 60; SEQ ID NO: 28 and SEQ ID NO: 61; SEQ ID NO: 28 and SEQ ID NO: 62; SEQ ID NO: 28 and SEQ ID NO: 63; SEQ ID NO: 28 and SEQ ID NO: 64; SEQ ID NO: 28 and SEQ ID NO: 65; SEQ ID NO: 28 and SEQ ID NO: 66; SEQ ID NO: 28 and SEQ ID NO: 67; SEQ ID NO: 28 and SEQ ID NO: 68; SEQ ID NO: 28 and SEQ ID NO: 69; SEQ ID NO: 29 and SEQ ID NO: 30; SEQ ID NO: 29 and SEQ ID NO: 31; SEQ ID NO: 29 and SEQ ID NO: 32; SEQ ID NO: 29 and SEQ ID NO: 33; SEQ ID NO: 29 and SEQ ID NO: 34; SEQ ID NO: 29 and SEQ ID NO: 35; SEQ ID NO: 29 and SEQ ID NO: 36; SEQ ID NO: 29 and SEQ ID NO: 37; SEQ ID NO: 29 and SEQ ID NO: 38; SEQ ID NO: 29 and SEQ ID NO: 39; SEQ ID NO: 29 and SEQ ID NO: 40; SEQ ID NO: 29 and SEQ ID NO: 41; SEQ ID NO: 29 and SEQ ID NO: 42; SEQ ID NO: 29 and SEQ ID NO: 43; SEQ ID NO: 29 and SEQ ID NO: 44; SEQ ID NO: 29 and SEQ ID NO: 45; SEQ ID NO: 29 and SEQ ID NO: 46; SEQ ID NO: 29 and SEQ ID NO: 47; SEQ ID NO: 29 and SEQ ID NO: 48; SEQ ID NO: 29 and SEQ ID NO: 53; SEQ ID NO: 29 and SEQ ID NO: 54; SEQ ID NO: 29 and SEQ ID NO: 55; SEQ ID NO: 29 and SEQ ID NO: 56; SEQ ID NO: 29 and SEQ ID NO: 57; SEQ ID NO: 29 and SEQ ID NO: 58; SEQ ID NO: 29 and SEQ ID NO: 59; SEQ ID NO: 29 and SEQ ID NO: 60; SEQ ID NO: 29 and SEQ ID NO: 61; SEQ ID NO: 29 and SEQ ID NO: 62; SEQ ID NO: 29 and SEQ ID NO: 63; SEQ ID NO: 29 and SEQ ID NO: 64; SEQ ID NO: 29 and SEQ ID NO: 65; SEQ ID NO: 29 and SEQ ID NO: 66; SEQ ID NO: 29 and SEQ ID NO: 67; SEQ ID NO: 29 and SEQ ID NO: 68; SEQ ID NO: 29 and SEQ ID NO: 69; SEQ ID NO: 30 and SEQ ID NO: 31; SEQ ID NO: 30 and SEQ ID NO: 32; SEQ ID NO: 30 and SEQ ID NO: 33; SEQ ID NO: 30 and SEQ ID NO: 34; SEQ ID NO: 30 and SEQ ID NO: 35; SEQ ID NO: 30 and SEQ ID NO: 36; SEQ ID NO: 30 and SEQ ID NO: 37; SEQ ID NO: 30 and SEQ ID NO: 38; SEQ ID NO: 30 and SEQ ID NO: 39; SEQ ID NO: 30 and SEQ ID NO: 40; SEQ ID NO: 30 and SEQ ID NO: 41; SEQ ID NO: 30 and SEQ ID NO: 42; SEQ ID NO: 30 and SEQ ID NO: 43; SEQ ID NO: 30 and SEQ ID NO: 44; SEQ ID NO: 30 and SEQ ID NO: 45; SEQ ID NO: 30 and SEQ ID NO: 46; SEQ ID NO: 30 and SEQ ID NO: 47; SEQ ID NO: 30 and SEQ ID NO: 48; SEQ ID NO: 30 and SEQ ID NO: 53; SEQ ID NO: 30 and SEQ ID NO: 54; SEQ ID NO: 30 and SEQ ID NO: 55; SEQ ID NO: 30 and SEQ ID NO: 56; SEQ ID NO: 30 and SEQ ID NO: 57; SEQ ID NO: 30 and SEQ ID NO: 58; SEQ ID NO: 30 and SEQ ID NO: 59; SEQ ID NO: 30 and SEQ ID NO: 60; SEQ ID NO: 30 and SEQ ID NO: 61; SEQ ID NO: 30 and SEQ ID NO: 62; SEQ ID NO: 30 and SEQ ID NO: 63; SEQ ID NO: 30 and SEQ ID NO: 64; SEQ ID NO: 30 and SEQ ID NO: 65; SEQ ID NO: 30 and SEQ ID NO: 66; SEQ ID NO: 30 and SEQ ID NO: 67; SEQ ID NO: 30 and SEQ ID NO: 68; SEQ ID NO: 30 and SEQ ID NO: 69; SEQ ID NO: 31 and SEQ ID NO: 32; SEQ ID NO: 31 and SEQ ID NO: 33; SEQ ID NO: 31 and SEQ ID NO: 34; SEQ ID NO: 31 and SEQ ID NO: 35; SEQ ID NO: 31 and SEQ ID NO: 36; SEQ ID NO: 31 and SEQ ID NO: 37; SEQ ID NO: 31 and SEQ ID NO: 38; SEQ ID NO: 31 and SEQ ID NO: 39; SEQ ID NO: 31 and SEQ ID NO: 40; SEQ ID NO: 31 and SEQ ID NO: 41; SEQ ID NO: 31 and SEQ ID NO: 42; SEQ ID NO: 31 and SEQ ID NO: 43; SEQ ID NO: 31 and SEQ ID NO: 44; SEQ ID NO: 31 and SEQ ID NO: 45; SEQ ID NO: 31 and SEQ ID NO: 46; SEQ ID NO: 31 and SEQ ID NO: 47; SEQ ID NO: 31 and SEQ ID NO: 48; SEQ ID NO: 31 and SEQ ID NO: 53; SEQ ID NO: 31 and SEQ ID NO: 54; SEQ ID NO: 31 and SEQ ID NO: 55; SEQ ID NO: 31 and SEQ ID NO: 56; SEQ ID NO: 31 and SEQ ID NO: 57; SEQ ID NO: 31 and SEQ ID NO: 58; SEQ ID NO: 31 and SEQ ID NO: 59; SEQ ID NO: 31 and SEQ ID NO: 60; SEQ ID NO: 31 and SEQ ID NO: 61; SEQ ID NO: 31 and SEQ ID NO: 62; SEQ ID NO: 31 and SEQ ID NO: 63; SEQ ID NO: 31 and SEQ ID NO: 64; SEQ ID NO: 31 and SEQ ID NO: 65; SEQ ID NO: 31 and SEQ ID NO: 66; SEQ ID NO: 31 and SEQ ID NO: 67; SEQ ID NO: 31 and SEQ ID NO: 68; SEQ ID NO: 31 and SEQ ID NO: 69; SEQ ID NO: 32 and SEQ ID NO: 33; SEQ ID NO: 32 and SEQ ID NO: 34; SEQ ID NO: 32 and SEQ ID NO: 35; SEQ ID NO: 32 and SEQ ID NO: 36; SEQ ID NO: 32 and SEQ ID NO: 37; SEQ ID NO: 32 and SEQ ID NO: 38; SEQ ID NO: 32 and SEQ ID NO: 39; SEQ ID NO: 32 and SEQ ID NO: 40; SEQ ID NO: 32 and SEQ ID NO: 41; SEQ ID NO: 32 and SEQ ID NO: 42; SEQ ID NO: 32 and SEQ ID NO: 43; SEQ ID NO: 32 and SEQ ID NO: 44; SEQ ID NO: 32 and SEQ ID NO: 45; SEQ ID NO: 32 and SEQ ID NO: 46; SEQ ID NO: 32 and SEQ ID NO: 47; SEQ ID NO: 32 and SEQ ID NO: 48; SEQ ID NO: 32 and SEQ ID NO: 53; SEQ ID NO: 32 and SEQ ID NO: 54; SEQ ID NO: 32 and SEQ ID NO: 55; SEQ ID NO: 32 and SEQ ID NO: 56; SEQ ID NO: 32 and SEQ ID NO: 57; SEQ ID NO: 32 and SEQ ID NO: 58; SEQ ID NO: 32 and SEQ ID NO: 59; SEQ ID NO: 32 and SEQ ID NO: 60; SEQ ID NO: 32 and SEQ ID NO: 61; SEQ ID NO: 32 and SEQ ID NO: 62; SEQ ID NO: 32 and SEQ ID NO: 63; SEQ ID NO: 32 and SEQ ID NO: 64; SEQ ID NO: 32 and SEQ ID NO: 65; SEQ ID NO: 32 and SEQ ID NO: 66; SEQ ID NO: 32 and SEQ ID NO: 67; SEQ ID NO: 32 and SEQ ID NO: 68; SEQ ID NO: 32 and SEQ ID NO: 69; SEQ ID NO: 33 and SEQ ID NO: 34; SEQ ID NO: 33 and SEQ ID NO: 35; SEQ ID NO: 33 and SEQ ID NO: 36; SEQ ID NO: 33 and SEQ ID NO: 37; SEQ ID NO: 33 and SEQ ID NO: 38; SEQ ID NO: 33 and SEQ ID NO: 39; SEQ ID NO: 33 and SEQ ID NO: 40; SEQ ID NO: 33 and SEQ ID NO: 41; SEQ ID NO: 33 and SEQ ID NO: 42; SEQ ID NO: 33 and SEQ ID NO: 43; SEQ ID NO: 33 and SEQ ID NO: 44; SEQ ID NO: 33 and SEQ ID NO: 45; SEQ ID NO: 33 and SEQ ID NO: 46; SEQ ID NO: 33 and SEQ ID NO: 47; SEQ ID NO: 33 and SEQ ID NO: 48; SEQ ID NO: 33 and SEQ ID NO: 53; SEQ ID NO: 33 and SEQ ID NO: 54; SEQ ID NO: 33 and SEQ ID NO: 55; SEQ ID NO: 33 and SEQ ID NO: 56; SEQ ID NO: 33 and SEQ ID NO: 57; SEQ ID NO: 33 and SEQ ID NO: 58; SEQ ID NO: 33 and SEQ ID NO: 59; SEQ ID NO: 33 and SEQ ID NO: 60; SEQ ID NO: 33 and SEQ ID NO: 61; SEQ ID NO: 33 and SEQ ID NO: 62; SEQ ID NO: 33 and SEQ ID NO: 63; SEQ ID NO: 33 and SEQ ID NO: 64; SEQ ID NO: 33 and SEQ ID NO: 65; SEQ ID NO: 33 and SEQ ID NO: 66; SEQ ID NO: 33 and SEQ ID NO: 67; SEQ ID NO: 33 and SEQ ID NO: 68; SEQ ID NO: 33 and SEQ ID NO: 69; SEQ ID NO: 34 and SEQ ID NO: 35; SEQ ID NO: 34 and SEQ ID NO: 36; SEQ ID NO: 34 and SEQ ID NO: 37; SEQ ID NO: 34 and SEQ ID NO: 38; SEQ ID NO: 34 and SEQ ID NO: 39; SEQ ID NO: 34 and SEQ ID NO: 40; SEQ ID NO: 34 and SEQ ID NO: 41; SEQ ID NO: 34 and SEQ ID NO: 42; SEQ ID NO: 34 and SEQ ID NO: 43; SEQ ID NO: 34 and SEQ ID NO: 44; SEQ ID NO: 34 and SEQ ID NO: 45; SEQ ID NO: 34 and SEQ ID NO: 46; SEQ ID NO: 34 and SEQ ID NO: 47; SEQ ID NO: 34 and SEQ ID NO: 48; SEQ ID NO: 34 and SEQ ID NO: 53; SEQ ID NO: 34 and SEQ ID NO: 54; SEQ ID NO: 34 and SEQ ID NO: 55; SEQ ID NO: 34 and SEQ ID NO: 56; SEQ ID NO: 34 and SEQ ID NO: 57; SEQ ID NO: 34 and SEQ ID NO: 58; SEQ ID NO: 34 and SEQ ID NO: 59; SEQ ID NO: 34 and SEQ ID NO: 60; SEQ ID NO: 34 and SEQ ID NO: 61; SEQ ID NO: 34 and SEQ ID NO: 62; SEQ ID NO: 34 and SEQ ID NO: 63; SEQ ID NO: 34 and SEQ ID NO: 64; SEQ ID NO: 34 and SEQ ID NO: 65; SEQ ID NO: 34 and SEQ ID NO: 66; SEQ ID NO: 34 and SEQ ID NO: 67; SEQ ID NO: 34 and SEQ ID NO: 68; SEQ ID NO: 34 and SEQ ID NO: 69; SEQ ID NO: 35 and SEQ ID NO: 36; SEQ ID NO: 35 and SEQ ID NO: 37; SEQ ID NO: 35 and SEQ ID NO: 38; SEQ ID NO: 35 and SEQ ID NO: 39; SEQ ID NO: 35 and SEQ ID NO: 40; SEQ ID NO: 35 and SEQ ID NO: 41; SEQ ID NO: 35 and SEQ ID NO: 42; SEQ ID NO: 35 and SEQ ID NO: 43; SEQ ID NO: 35 and SEQ ID NO: 44; SEQ ID NO: 35 and SEQ ID NO: 45; SEQ ID NO: 35 and SEQ ID NO: 46; SEQ ID NO: 35 and SEQ ID NO: 47; SEQ ID NO: 35 and SEQ ID NO: 48; SEQ ID NO: 35 and SEQ ID NO: 53; SEQ ID NO: 35 and SEQ ID NO: 54; SEQ ID NO: 35 and SEQ ID NO: 55; SEQ ID NO: 35 and SEQ ID NO: 56; SEQ ID NO: 35 and SEQ ID NO: 57; SEQ ID NO: 35 and SEQ ID NO: 58; SEQ ID NO: 35 and SEQ ID NO: 59; SEQ ID NO: 35 and SEQ ID NO: 60; SEQ ID NO: 35 and SEQ ID NO: 61; SEQ ID NO: 35 and SEQ ID NO: 62; SEQ ID NO: 35 and SEQ ID NO: 63; SEQ ID NO: 35 and SEQ ID NO: 64; SEQ ID NO: 35 and SEQ ID NO: 65; SEQ ID NO: 35 and SEQ ID NO: 66; SEQ ID NO: 35 and SEQ ID NO: 67; SEQ ID NO: 35 and SEQ ID NO: 68; SEQ ID NO: 35 and SEQ ID NO: 69; SEQ ID NO: 36 and SEQ ID NO: 37; SEQ ID NO: 36 and SEQ ID NO: 38; SEQ ID NO: 36 and SEQ ID NO: 39; SEQ ID NO: 36 and SEQ ID NO: 40; SEQ ID NO: 36 and SEQ ID NO: 41; SEQ ID NO: 36 and SEQ ID NO: 42; SEQ ID NO: 36 and SEQ ID NO: 43; SEQ ID NO: 36 and SEQ ID NO: 44; SEQ ID NO: 36 and SEQ ID NO: 45; SEQ ID NO: 36 and SEQ ID NO: 46; SEQ ID NO: 36 and SEQ ID NO: 47; SEQ ID NO: 36 and SEQ ID NO: 48; SEQ ID NO: 36 and SEQ ID NO: 53; SEQ ID NO: 36 and SEQ ID NO: 54; SEQ ID NO: 36 and SEQ ID NO: 55; SEQ ID NO: 36 and SEQ ID NO: 56; SEQ ID NO: 36 and SEQ ID NO: 57; SEQ ID NO: 36 and SEQ ID NO: 58; SEQ ID NO: 36 and SEQ ID NO: 59; SEQ ID NO: 36 and SEQ ID NO: 60; SEQ ID NO: 36 and SEQ ID NO: 61; SEQ ID NO: 36 and SEQ ID NO: 62; SEQ ID NO: 36 and SEQ ID NO: 63; SEQ ID NO: 36 and SEQ ID NO: 64; SEQ ID NO: 36 and SEQ ID NO: 65; SEQ ID NO: 36 and SEQ ID NO: 66; SEQ ID NO: 36 and SEQ ID NO: 67; SEQ ID NO: 36 and SEQ ID NO: 68; SEQ ID NO: 36 and SEQ ID NO: 69; SEQ ID NO: 37 and SEQ ID NO: 38; SEQ ID NO: 37 and SEQ ID NO: 39; SEQ ID NO: 37 and SEQ ID NO: 40; SEQ ID NO: 37 and SEQ ID NO: 41; SEQ ID NO: 37 and SEQ ID NO: 42; SEQ ID NO: 37 and SEQ ID NO: 43; SEQ ID NO: 37 and SEQ ID NO: 44; SEQ ID NO: 37 and SEQ ID NO: 45; SEQ ID NO: 37 and SEQ ID NO: 46; SEQ ID NO: 37 and SEQ ID NO: 47; SEQ ID NO: 37 and SEQ ID NO: 48; SEQ ID NO: 37 and SEQ ID NO: 53; SEQ ID NO: 37 and SEQ ID NO: 54; SEQ ID NO: 37 and SEQ ID NO: 55; SEQ ID NO: 37 and SEQ ID NO: 56; SEQ ID NO: 37 and SEQ ID NO: 57; SEQ ID NO: 37 and SEQ ID NO: 58; SEQ ID NO: 37 and SEQ ID NO: 59; SEQ ID NO: 37 and SEQ ID NO: 60; SEQ ID NO: 37 and SEQ ID NO: 61; SEQ ID NO: 37 and SEQ ID NO: 62; SEQ ID NO: 37 and SEQ ID NO: 63; SEQ ID NO: 37 and SEQ ID NO: 64; SEQ ID NO: 37 and SEQ ID NO: 65; SEQ ID NO: 37 and SEQ ID NO: 66; SEQ ID NO: 37 and SEQ ID NO: 67; SEQ ID NO: 37 and SEQ ID NO: 68; SEQ ID NO: 37 and SEQ ID NO: 69; SEQ ID NO: 38 and SEQ ID NO: 39; SEQ ID NO: 38 and SEQ ID NO: 40; SEQ ID NO: 38 and SEQ ID NO: 41; SEQ ID NO: 38 and SEQ ID NO: 42; SEQ ID NO: 38 and SEQ ID NO: 43; SEQ ID NO: 38 and SEQ ID NO: 44; SEQ ID NO: 38 and SEQ ID NO: 45; SEQ ID NO: 38 and SEQ ID NO: 46; SEQ ID NO: 38 and SEQ ID NO: 47; SEQ ID NO: 38 and SEQ ID NO: 48; SEQ ID NO: 38 and SEQ ID NO: 53; SEQ ID NO: 38 and SEQ ID NO: 54; SEQ ID NO: 38 and SEQ ID NO: 55; SEQ ID NO: 38 and SEQ ID NO: 56; SEQ ID NO: 38 and SEQ ID NO: 57; SEQ ID NO: 38 and SEQ ID NO: 58; SEQ ID NO: 38 and SEQ ID NO: 59; SEQ ID NO: 38 and SEQ ID NO: 60; SEQ ID NO: 38 and SEQ ID NO: 61; SEQ ID NO: 38 and SEQ ID NO: 62; SEQ ID NO: 38 and SEQ ID NO: 63; SEQ ID NO: 38 and SEQ ID NO: 64; SEQ ID NO: 38 and SEQ ID NO: 65; SEQ ID NO: 38 and SEQ ID NO: 66; SEQ ID NO: 38 and SEQ ID NO: 67; SEQ ID NO: 38 and SEQ ID NO: 68; SEQ ID NO: 38 and SEQ ID NO: 69; SEQ ID NO: 39 and SEQ ID NO: 40; SEQ ID NO: 39 and SEQ ID NO: 41; SEQ ID NO: 39 and SEQ ID NO: 42; SEQ ID NO: 39 and SEQ ID NO: 43; SEQ ID NO: 39 and SEQ ID NO: 44; SEQ ID NO: 39 and SEQ ID NO: 45; SEQ ID NO: 39 and SEQ ID NO: 46; SEQ ID NO: 39 and SEQ ID NO: 47; SEQ ID NO: 39 and SEQ ID NO: 48; SEQ ID NO: 39 and SEQ ID NO: 53; SEQ ID NO: 39 and SEQ ID NO: 54; SEQ ID NO: 39 and SEQ ID NO: 55; SEQ ID NO: 39 and SEQ ID NO: 56; SEQ ID NO: 39 and SEQ ID NO: 57; SEQ ID NO: 39 and SEQ ID NO: 58; SEQ ID NO: 39 and SEQ ID NO: 59; SEQ ID NO: 39 and SEQ ID NO: 60; SEQ ID NO: 39 and SEQ ID NO: 61; SEQ ID NO: 39 and SEQ ID NO: 62; SEQ ID NO: 39 and SEQ ID NO: 63; SEQ ID NO: 39 and SEQ ID NO: 64; SEQ ID NO: 39 and SEQ ID NO: 65; SEQ ID NO: 39 and SEQ ID NO: 66; SEQ ID NO: 39 and SEQ ID NO: 67; SEQ ID NO: 39 and SEQ ID NO: 68; SEQ ID NO: 39 and SEQ ID NO: 69; SEQ ID NO: 40 and SEQ ID NO: 41; SEQ ID NO: 40 and SEQ ID NO: 42; SEQ ID NO: 40 and SEQ ID NO: 43; SEQ ID NO: 40 and SEQ ID NO: 44; SEQ ID NO: 40 and SEQ ID NO: 45; SEQ ID NO: 40 and SEQ ID NO: 46; SEQ ID NO: 40 and SEQ ID NO: 47; SEQ ID NO: 40 and SEQ ID NO: 48; SEQ ID NO: 40 and SEQ ID NO: 53; SEQ ID NO: 40 and SEQ ID NO: 54; SEQ ID NO: 40 and SEQ ID NO: 55; SEQ ID NO: 40 and SEQ ID NO: 56; SEQ ID NO: 40 and SEQ ID NO: 57; SEQ ID NO: 40 and SEQ ID NO: 58; SEQ ID NO: 40 and SEQ ID NO: 59; SEQ ID NO: 40 and SEQ ID NO: 60; SEQ ID NO: 40 and SEQ ID NO: 61; SEQ ID NO: 40 and SEQ ID NO: 62; SEQ ID NO: 40 and SEQ ID NO: 63; SEQ ID NO: 40 and SEQ ID NO: 64; SEQ ID NO: 40 and SEQ ID NO: 65; SEQ ID NO: 40 and SEQ ID NO: 66; SEQ ID NO: 40 and SEQ ID NO: 67; SEQ ID NO: 40 and SEQ ID NO: 68; SEQ ID NO: 40 and SEQ ID NO: 69; SEQ ID NO: 41 and SEQ ID NO: 42; SEQ ID NO: 41 and SEQ ID NO: 43; SEQ ID NO: 41 and SEQ ID NO: 44; SEQ ID NO: 41 and SEQ ID NO: 45; SEQ ID NO: 41 and SEQ ID NO: 46; SEQ ID NO: 41 and SEQ ID NO: 47; SEQ ID NO: 41 and SEQ ID NO: 48; SEQ ID NO: 41 and SEQ ID NO: 53; SEQ ID NO: 41 and SEQ ID NO: 54; SEQ ID NO: 41 and SEQ ID NO: 55; SEQ ID NO: 41 and SEQ ID NO: 56; SEQ ID NO: 41 and SEQ ID NO: 57; SEQ ID NO: 41 and SEQ ID NO: 58; SEQ ID NO: 41 and SEQ ID NO: 59; SEQ ID NO: 41 and SEQ ID NO: 60; SEQ ID NO: 41 and SEQ ID NO: 61; SEQ ID NO: 41 and SEQ ID NO: 62; SEQ ID NO: 41 and SEQ ID NO: 63; SEQ ID NO: 41 and SEQ ID NO: 64; SEQ ID NO: 41 and SEQ ID NO: 65; SEQ ID NO: 41 and SEQ ID NO: 66; SEQ ID NO: 41 and SEQ ID NO: 67; SEQ ID NO: 41 and SEQ ID NO: 68; SEQ ID NO: 41 and SEQ ID NO: 69; SEQ ID NO: 42 and SEQ ID NO: 43; SEQ ID NO: 42 and SEQ ID NO: 44; SEQ ID NO: 42 and SEQ ID NO: 45; SEQ ID NO: 42 and SEQ ID NO: 46; SEQ ID NO: 42 and SEQ ID NO: 47; SEQ ID NO: 42 and SEQ ID NO: 48; SEQ ID NO: 42 and SEQ ID NO: 53; SEQ ID NO: 42 and SEQ ID NO: 54; SEQ ID NO: 42 and SEQ ID NO: 55; SEQ ID NO: 42 and SEQ ID NO: 56; SEQ ID NO: 42 and SEQ ID NO: 57; SEQ ID NO: 42 and SEQ ID NO: 58; SEQ ID NO: 42 and SEQ ID NO: 59; SEQ ID NO: 42 and SEQ ID NO: 60; SEQ ID NO: 42 and SEQ ID NO: 61; SEQ ID NO: 42 and SEQ ID NO: 62; SEQ ID NO: 42 and SEQ ID NO: 63; SEQ ID NO: 42 and SEQ ID NO: 64; SEQ ID NO: 42 and SEQ ID NO: 65; SEQ ID NO: 42 and SEQ ID NO: 66; SEQ ID NO: 42 and SEQ ID NO: 67; SEQ ID NO: 42 and SEQ ID NO: 68; SEQ ID NO: 42 and SEQ ID NO: 69; SEQ ID NO: 43 and SEQ ID NO: 44; SEQ ID NO: 43 and SEQ ID NO: 45; SEQ ID NO: 43 and SEQ ID NO: 46; SEQ ID NO: 43 and SEQ ID NO: 47; SEQ ID NO: 43 and SEQ ID NO: 48; SEQ ID NO: 43 and SEQ ID NO: 53; SEQ ID NO: 43 and SEQ ID NO: 54; SEQ ID NO: 43 and SEQ ID NO: 55; SEQ ID NO: 43 and SEQ ID NO: 56; SEQ ID NO: 43 and SEQ ID NO: 57; SEQ ID NO: 43 and SEQ ID NO: 58; SEQ ID NO: 43 and SEQ ID NO: 59; SEQ ID NO: 43 and SEQ ID NO: 60; SEQ ID NO: 43 and SEQ ID NO: 61; SEQ ID NO: 43 and SEQ ID NO: 62; SEQ ID NO: 43 and SEQ ID NO: 63; SEQ ID NO: 43 and SEQ ID NO: 64; SEQ ID NO: 43 and SEQ ID NO: 65; SEQ ID NO: 43 and SEQ ID NO: 66; SEQ ID NO: 43 and SEQ ID NO: 67; SEQ ID NO: 43 and SEQ ID NO: 68; SEQ ID NO: 43 and SEQ ID NO: 69; SEQ ID NO: 44 and SEQ ID NO: 45; SEQ ID NO: 44 and SEQ ID NO: 46; SEQ ID NO: 44 and SEQ ID NO: 47; SEQ ID NO: 44 and SEQ ID NO: 48; SEQ ID NO: 44 and SEQ ID NO: 53; SEQ ID NO: 44 and SEQ ID NO: 54; SEQ ID NO: 44 and SEQ ID NO: 55; SEQ ID NO: 44 and SEQ ID NO: 56; SEQ ID NO: 44 and SEQ ID NO: 57; SEQ ID NO: 44 and SEQ ID NO: 58; SEQ ID NO: 44 and SEQ ID NO: 59; SEQ ID NO: 44 and SEQ ID NO: 60; SEQ ID NO: 44 and SEQ ID NO: 61; SEQ ID NO: 44 and SEQ ID NO: 62; SEQ ID NO: 44 and SEQ ID NO: 63; SEQ ID NO: 44 and SEQ ID NO: 64; SEQ ID NO: 44 and SEQ ID NO: 65; SEQ ID NO: 44 and SEQ ID NO: 66; SEQ ID NO: 44 and SEQ ID NO: 67; SEQ ID NO: 44 and SEQ ID NO: 68; SEQ ID NO: 44 and SEQ ID NO: 69; SEQ ID NO: 45 and SEQ ID NO: 46; SEQ ID NO: 45 and SEQ ID NO: 47; SEQ ID NO: 45 and SEQ ID NO: 48; SEQ ID NO: 45 and SEQ ID NO: 53; SEQ ID NO: 45 and SEQ ID NO: 54; SEQ ID NO: 45 and SEQ ID NO: 55; SEQ ID NO: 45 and SEQ ID NO: 56; SEQ ID NO: 45 and SEQ ID NO: 57; SEQ ID NO: 45 and SEQ ID NO: 58; SEQ ID NO: 45 and SEQ ID NO: 59; SEQ ID NO: 45 and SEQ ID NO: 60; SEQ ID NO: 45 and SEQ ID NO: 61; SEQ ID NO: 45 and SEQ ID NO: 62; SEQ ID NO: 45 and SEQ ID NO: 63; SEQ ID NO: 45 and SEQ ID NO: 64; SEQ ID NO: 45 and SEQ ID NO: 65; SEQ ID NO: 45 and SEQ ID NO: 66; SEQ ID NO: 45 and SEQ ID NO: 67; SEQ ID NO: 45 and SEQ ID NO: 68; SEQ ID NO: 45 and SEQ ID NO: 69; SEQ ID NO: 46 and SEQ ID NO: 47; SEQ ID NO: 46 and SEQ ID NO: 48; SEQ ID NO: 46 and SEQ ID NO: 53; SEQ ID NO: 46 and SEQ ID NO: 54; SEQ ID NO: 46 and SEQ ID NO: 55; SEQ ID NO: 46 and SEQ ID NO: 56; SEQ ID NO: 46 and SEQ ID NO: 57; SEQ ID NO: 46 and SEQ ID NO: 58; SEQ ID NO: 46 and SEQ ID NO: 59; SEQ ID NO: 46 and SEQ ID NO: 60; SEQ ID NO: 46 and SEQ ID NO: 61; SEQ ID NO: 46 and SEQ ID NO: 62; SEQ ID NO: 46 and SEQ ID NO: 63; SEQ ID NO: 46 and SEQ ID NO: 64; SEQ ID NO: 46 and SEQ ID NO: 65; SEQ ID NO: 46 and SEQ ID NO: 66; SEQ ID NO: 46 and SEQ ID NO: 67; SEQ ID NO: 46 and SEQ ID NO: 68; SEQ ID NO: 46 and SEQ ID NO: 69; SEQ ID NO: 47 and SEQ ID NO: 48; SEQ ID NO: 47 and SEQ ID NO: 53; SEQ ID NO: 47 and SEQ ID NO: 54; SEQ ID NO: 47 and SEQ ID NO: 55; SEQ ID NO: 47 and SEQ ID NO: 56; SEQ ID NO: 47 and SEQ ID NO: 57; SEQ ID NO: 47 and SEQ ID NO: 58; SEQ ID NO: 47 and SEQ ID NO: 59; SEQ ID NO: 47 and SEQ ID NO: 60; SEQ ID NO: 47 and SEQ ID NO: 61; SEQ ID NO: 47 and SEQ ID NO: 62; SEQ ID NO: 47 and SEQ ID NO: 63; SEQ ID NO: 47 and SEQ ID NO: 64; SEQ ID NO: 47 and SEQ ID NO: 65; SEQ ID NO: 47 and SEQ ID NO: 66; SEQ ID NO: 47 and SEQ ID NO: 67; SEQ ID NO: 47 and SEQ ID NO: 68; SEQ ID NO: 47 and SEQ ID NO: 69; SEQ ID NO: 48 and SEQ ID NO: 53; SEQ ID NO: 48 and SEQ ID NO: 54; SEQ ID NO: 48 and SEQ ID NO: 55; SEQ ID NO: 48 and SEQ ID NO: 56; SEQ ID NO: 48 and SEQ ID NO: 57; SEQ ID NO: 48 and SEQ ID NO: 58; SEQ ID NO: 48 and SEQ ID NO: 59; SEQ ID NO: 48 and SEQ ID NO: 60; SEQ ID NO: 48 and SEQ ID NO: 61; SEQ ID NO: 48 and SEQ ID NO: 62; SEQ ID NO: 48 and SEQ ID NO: 63; SEQ ID NO: 48 and SEQ ID NO: 64; SEQ ID NO: 48 and SEQ ID NO: 65; SEQ ID NO: 48 and SEQ ID NO: 66; SEQ ID NO: 48 and SEQ ID NO: 67; SEQ ID NO: 48 and SEQ ID NO: 68; SEQ ID NO: 48 and SEQ ID NO: 69; SEQ ID NO: 53 and SEQ ID NO: 54; SEQ ID NO: 53 and SEQ ID NO: 55; SEQ ID NO: 53 and SEQ ID NO: 56; SEQ ID NO: 53 and SEQ ID NO: 57; SEQ ID NO: 53 and SEQ ID NO: 58; SEQ ID NO: 53 and SEQ ID NO: 59; SEQ ID NO: 53 and SEQ ID NO: 60; SEQ ID NO: 53 and SEQ ID NO: 61; SEQ ID NO: 53 and SEQ ID NO: 62; SEQ ID NO: 53 and SEQ ID NO: 63; SEQ ID NO: 53 and SEQ ID NO: 64; SEQ ID NO: 53 and SEQ ID NO: 65; SEQ ID NO: 53 and SEQ ID NO: 66; SEQ ID NO: 53 and SEQ ID NO: 67; SEQ ID NO: 53 and SEQ ID NO: 68; SEQ ID NO: 53 and SEQ ID NO: 69; SEQ ID NO: 54 and SEQ ID NO: 55; SEQ ID NO: 54 and SEQ ID NO: 56; SEQ ID NO: 54 and SEQ ID NO: 57; SEQ ID NO: 54 and SEQ ID NO: 58; SEQ ID NO: 54 and SEQ ID NO: 59; SEQ ID NO: 54 and SEQ ID NO: 60; SEQ ID NO: 54 and SEQ ID NO: 61; SEQ ID NO: 54 and SEQ ID NO: 62; SEQ ID NO: 54 and SEQ ID NO: 63; SEQ ID NO: 54 and SEQ ID NO: 64; SEQ ID NO: 54 and SEQ ID NO: 65; SEQ ID NO: 54 and SEQ ID NO: 66; SEQ ID NO: 54 and SEQ ID NO: 67; SEQ ID NO: 54 and SEQ ID NO: 68; SEQ ID NO: 54 and SEQ ID NO: 69; SEQ ID NO: 55 and SEQ ID NO: 56; SEQ ID NO: 55 and SEQ ID NO: 57; SEQ ID NO: 55 and SEQ ID NO: 58; SEQ ID NO: 55 and SEQ ID NO: 59; SEQ ID NO: 55 and SEQ ID NO: 60; SEQ ID NO: 55 and SEQ ID NO: 61; SEQ ID NO: 55 and SEQ ID NO: 62; SEQ ID NO: 55 and SEQ ID NO: 63; SEQ ID NO: 55 and SEQ ID NO: 64; SEQ ID NO: 55 and SEQ ID NO: 65; SEQ ID NO: 55 and SEQ ID NO: 66; SEQ ID NO: 55 and SEQ ID NO: 67; SEQ ID NO: 55 and SEQ ID NO: 68; SEQ ID NO: 55 and SEQ ID NO: 69; SEQ ID NO: 56 and SEQ ID NO: 57; SEQ ID NO: 56 and SEQ ID NO: 58; SEQ ID NO: 56 and SEQ ID NO: 59; SEQ ID NO: 56 and SEQ ID NO: 60; SEQ ID NO: 56 and SEQ ID NO: 61; SEQ ID NO: 56 and SEQ ID NO: 62; SEQ ID NO: 56 and SEQ ID NO: 63; SEQ ID NO: 56 and SEQ ID NO: 64; SEQ ID NO: 56 and SEQ ID NO: 65; SEQ ID NO: 56 and SEQ ID NO: 66; SEQ ID NO: 56 and SEQ ID NO: 67; SEQ ID NO: 56 and SEQ ID NO: 68; SEQ ID NO: 56 and SEQ ID NO: 69; SEQ ID NO: 57 and SEQ ID NO: 58; SEQ ID NO: 57 and SEQ ID NO: 59; SEQ ID NO: 57 and SEQ ID NO: 60; SEQ ID NO: 57 and SEQ ID NO: 61; SEQ ID NO: 57 and SEQ ID NO: 62; SEQ ID NO: 57 and SEQ ID NO: 63; SEQ ID NO: 57 and SEQ ID NO: 64; SEQ ID NO: 57 and SEQ ID NO: 65; SEQ ID NO: 57 and SEQ ID NO: 66; SEQ ID NO: 57 and SEQ ID NO: 67; SEQ ID NO: 57 and SEQ ID NO: 68; SEQ ID NO: 57 and SEQ ID NO: 69; SEQ ID NO: 58 and SEQ ID NO: 59; SEQ ID NO: 58 and SEQ ID NO: 60; SEQ ID NO: 58 and SEQ ID NO: 61; SEQ ID NO: 58 and SEQ ID NO: 62; SEQ ID NO: 58 and SEQ ID NO: 63; SEQ ID NO: 58 and SEQ ID NO: 64; SEQ ID NO: 58 and SEQ ID NO: 65; SEQ ID NO: 58 and SEQ ID NO: 66; SEQ ID NO: 58 and SEQ ID NO: 67; SEQ ID NO: 58 and SEQ ID NO: 68; SEQ ID NO: 58 and SEQ ID NO: 69; SEQ ID NO: 59 and SEQ ID NO: 60; SEQ ID NO: 59 and SEQ ID NO: 61; SEQ ID NO: 59 and SEQ ID NO: 62; SEQ ID NO: 59 and SEQ ID NO: 63; SEQ ID NO: 59 and SEQ ID NO: 64; SEQ ID NO: 59 and SEQ ID NO: 65; SEQ ID NO: 59 and SEQ ID NO: 66; SEQ ID NO: 59 and SEQ ID NO: 67; SEQ ID NO: 59 and SEQ ID NO: 68; SEQ ID NO: 59 and SEQ ID NO: 69; SEQ ID NO: 60 and SEQ ID NO: 61; SEQ ID NO: 60 and SEQ ID NO: 62; SEQ ID NO: 60 and SEQ ID NO: 63; SEQ ID NO: 60 and SEQ ID NO: 64; SEQ ID NO: 60 and SEQ ID NO: 65; SEQ ID NO: 60 and SEQ ID NO: 66; SEQ ID NO: 60 and SEQ ID NO: 67; SEQ ID NO: 60 and SEQ ID NO: 68; SEQ ID NO: 60 and SEQ ID NO: 69; SEQ ID NO: 61 and SEQ ID NO: 62; SEQ ID NO: 61 and SEQ ID NO: 63; SEQ ID NO: 61 and SEQ ID NO: 64; SEQ ID NO: 61 and SEQ ID NO: 65; SEQ ID NO: 61 and SEQ ID NO: 66; SEQ ID NO: 61 and SEQ ID NO: 67; SEQ ID NO: 61 and SEQ ID NO: 68; SEQ ID NO: 61 and SEQ ID NO: 69; SEQ ID NO: 62 and SEQ ID NO: 63; SEQ ID NO: 62 and SEQ ID NO: 64; SEQ ID NO: 62 and SEQ ID NO: 65; SEQ ID NO: 62 and SEQ ID NO: 66; SEQ ID NO: 62 and SEQ ID NO: 67; SEQ ID NO: 62 and SEQ ID NO: 68; SEQ ID NO: 62 and SEQ ID NO: 69; SEQ ID NO: 63 and SEQ ID NO: 64; SEQ ID NO: 63 and SEQ ID NO: 65; SEQ ID NO: 63 and SEQ ID NO: 66; SEQ ID NO: 63 and SEQ ID NO: 67; SEQ ID NO: 63 and SEQ ID NO: 68; SEQ ID NO: 63 and SEQ ID NO: 69; SEQ ID NO: 64 and SEQ ID NO: 65; SEQ ID NO: 64 and SEQ ID NO: 66; SEQ ID NO: 64 and SEQ ID NO: 67; SEQ ID NO: 64 and SEQ ID NO: 68; SEQ ID NO: 64 and SEQ ID NO: 69; SEQ ID NO: 65 and SEQ ID NO: 66; SEQ ID NO: 65 and SEQ ID NO: 67; SEQ ID NO: 65 and SEQ ID NO: 68; SEQ ID NO: 65 and SEQ ID NO: 69; SEQ ID NO: 66 and SEQ ID NO: 67; SEQ ID NO: 66 and SEQ ID NO: 68; SEQ ID NO: 66 and SEQ ID NO: 69; SEQ ID NO: 67 and SEQ ID NO: 68; SEQ ID NO: 67 and SEQ ID NO: 69; SEQ ID NO: 68 and SEQ ID NO: 69; SEQ ID NO: 243 and SEQ ID NO: 244; SEQ ID NO: 243 and SEQ ID NO: 245; SEQ ID NO: 243 and SEQ ID NO: 246; SEQ ID NO: 243 and SEQ ID NO: 247; SEQ ID NO: 243 and SEQ ID NO: 248; SEQ ID NO: 243 and SEQ ID NO: 249; SEQ ID NO: 243 and SEQ ID NO: 250; SEQ ID NO: 243 and SEQ ID NO: 251; SEQ ID NO: 243 and SEQ ID NO: 252; SEQ ID NO: 243 and SEQ ID NO: 253; SEQ ID NO: 243 and SEQ ID NO: 254; SEQ ID NO: 243 and SEQ ID NO: 255; SEQ ID NO: 243 and SEQ ID NO: 256; SEQ ID NO: 243 and SEQ ID NO: 257; SEQ ID NO: 243 and SEQ ID NO: 258; SEQ ID NO: 243 and SEQ ID NO: 259; SEQ ID NO: 243 and SEQ ID NO: 260; SEQ ID NO: 243 and SEQ ID NO: 261; SEQ ID NO: 243 and SEQ ID NO: 262; SEQ ID NO: 243 and SEQ ID NO: 263; SEQ ID NO: 243 and SEQ ID NO: 264; SEQ ID NO: 243 and SEQ ID NO: 265; SEQ ID NO: 243 and SEQ ID NO: 266; SEQ ID NO: 243 and SEQ ID NO: 267; SEQ ID NO: 243 and SEQ ID NO: 268; SEQ ID NO: 243 and SEQ ID NO: 269; SEQ ID NO: 244 and SEQ ID NO: 245; SEQ ID NO: 244 and SEQ ID NO: 246; SEQ ID NO: 244 and SEQ ID NO: 247; SEQ ID NO: 244 and SEQ ID NO: 248; SEQ ID NO: 244 and SEQ ID NO: 249; SEQ ID NO: 244 and SEQ ID NO: 250; SEQ ID NO: 244 and SEQ ID NO: 251; SEQ ID NO: 244 and SEQ ID NO: 252; SEQ ID NO: 244 and SEQ ID NO: 253; SEQ ID NO: 244 and SEQ ID NO: 254; SEQ ID NO: 244 and SEQ ID NO: 255; SEQ ID NO: 244 and SEQ ID NO: 256; SEQ ID NO: 244 and SEQ ID NO: 257; SEQ ID NO: 244 and SEQ ID NO: 258; SEQ ID NO: 244 and SEQ ID NO: 259; SEQ ID NO: 244 and SEQ ID NO: 260; SEQ ID NO: 244 and SEQ ID NO: 261; SEQ ID NO: 244 and SEQ ID NO: 262; SEQ ID NO: 244 and SEQ ID NO: 263; SEQ ID NO: 244 and SEQ ID NO: 264; SEQ ID NO: 244 and SEQ ID NO: 265; SEQ ID NO: 244 and SEQ ID NO: 266; SEQ ID NO: 244 and SEQ ID NO: 267; SEQ ID NO: 244 and SEQ ID NO: 268; SEQ ID NO: 244 and SEQ ID NO: 269; SEQ ID NO: 245 and SEQ ID NO: 246; SEQ ID NO: 245 and SEQ ID NO: 247; SEQ ID NO: 245 and SEQ ID NO: 248; SEQ ID NO: 245 and SEQ ID NO: 249; SEQ ID NO: 245 and SEQ ID NO: 250; SEQ ID NO: 245 and SEQ ID NO: 251; SEQ ID NO: 245 and SEQ ID NO: 252; SEQ ID NO: 245 and SEQ ID NO: 253; SEQ ID NO: 245 and SEQ ID NO: 254; SEQ ID NO: 245 and SEQ ID NO: 255; SEQ ID NO: 245 and SEQ ID NO: 256; SEQ ID NO: 245 and SEQ ID NO: 257; SEQ ID NO: 245 and SEQ ID NO: 258; SEQ ID NO: 245 and SEQ ID NO: 259; SEQ ID NO: 245 and SEQ ID NO: 260; SEQ ID NO: 245 and SEQ ID NO: 261; SEQ ID NO: 245 and SEQ ID NO: 262; SEQ ID NO: 245 and SEQ ID NO: 263; SEQ ID NO: 245 and SEQ ID NO: 264; SEQ ID NO: 245 and SEQ ID NO: 265; SEQ ID NO: 245 and SEQ ID NO: 266; SEQ ID NO: 245 and SEQ ID NO: 267; SEQ ID NO: 245 and SEQ ID NO: 268; SEQ ID NO: 245 and SEQ ID NO: 269; SEQ ID NO: 246 and SEQ ID NO: 247; SEQ ID NO: 246 and SEQ ID NO: 248; SEQ ID NO: 246 and SEQ ID NO: 249; SEQ ID NO: 246 and SEQ ID NO: 250; SEQ ID NO: 246 and SEQ ID NO: 251; SEQ ID NO: 246 and SEQ ID NO: 252; SEQ ID NO: 246 and SEQ ID NO: 253; SEQ ID NO: 246 and SEQ ID NO: 254; SEQ ID NO: 246 and SEQ ID NO: 255; SEQ ID NO: 246 and SEQ ID NO: 256; SEQ ID NO: 246 and SEQ ID NO: 257; SEQ ID NO: 246 and SEQ ID NO: 258; SEQ ID NO: 246 and SEQ ID NO: 259; SEQ ID NO: 246 and SEQ ID NO: 260; SEQ ID NO: 246 and SEQ ID NO: 261; SEQ ID NO: 246 and SEQ ID NO: 262; SEQ ID NO: 246 and SEQ ID NO: 263; SEQ ID NO: 246 and SEQ ID NO: 264; SEQ ID NO: 246 and SEQ ID NO: 265; SEQ ID NO: 246 and SEQ ID NO: 266; SEQ ID NO: 246 and SEQ ID NO: 267; SEQ ID NO: 246 and SEQ ID NO: 268; SEQ ID NO: 246 and SEQ ID NO: 269; SEQ ID NO: 247 and SEQ ID NO: 248; SEQ ID NO: 247 and SEQ ID NO: 249; SEQ ID NO: 247 and SEQ ID NO: 250; SEQ ID NO: 247 and SEQ ID NO: 251; SEQ ID NO: 247 and SEQ ID NO: 252; SEQ ID NO: 247 and SEQ ID NO: 253; SEQ ID NO: 247 and SEQ ID NO: 254; SEQ ID NO: 247 and SEQ ID NO: 255; SEQ ID NO: 247 and SEQ ID NO: 256; SEQ ID NO: 247 and SEQ ID NO: 257; SEQ ID NO: 247 and SEQ ID NO: 258; SEQ ID NO: 247 and SEQ ID NO: 259; SEQ ID NO: 247 and SEQ ID NO: 260; SEQ ID NO: 247 and SEQ ID NO: 261; SEQ ID NO: 247 and SEQ ID NO: 262; SEQ ID NO: 247 and SEQ ID NO: 263; SEQ ID NO: 247 and SEQ ID NO: 264; SEQ ID NO: 247 and SEQ ID NO: 265; SEQ ID NO: 247 and SEQ ID NO: 266; SEQ ID NO: 247 and SEQ ID NO: 267; SEQ ID NO: 247 and SEQ ID NO: 268; SEQ ID NO: 247 and SEQ ID NO: 269; SEQ ID NO: 248 and SEQ ID NO: 249; SEQ ID NO: 248 and SEQ ID NO: 250; SEQ ID NO: 248 and SEQ ID NO: 251; SEQ ID NO: 248 and SEQ ID NO: 252; SEQ ID NO: 248 and SEQ ID NO: 253; SEQ ID NO: 248 and SEQ ID NO: 254; SEQ ID NO: 248 and SEQ ID NO: 255; SEQ ID NO: 248 and SEQ ID NO: 256; SEQ ID NO: 248 and SEQ ID NO: 257; SEQ ID NO: 248 and SEQ ID NO: 258; SEQ ID NO: 248 and SEQ ID NO: 259; SEQ ID NO: 248 and SEQ ID NO: 260; SEQ ID NO: 248 and SEQ ID NO: 261; SEQ ID NO: 248 and SEQ ID NO: 262; SEQ ID NO: 248 and SEQ ID NO: 263; SEQ ID NO: 248 and SEQ ID NO: 264; SEQ ID NO: 248 and SEQ ID NO: 265; SEQ ID NO: 248 and SEQ ID NO: 266; SEQ ID NO: 248 and SEQ ID NO: 267; SEQ ID NO: 248 and SEQ ID NO: 268; SEQ ID NO: 248 and SEQ ID NO: 269; SEQ ID NO: 249 and SEQ ID NO: 250; SEQ ID NO: 249 and SEQ ID NO: 251; SEQ ID NO: 249 and SEQ ID NO: 252; SEQ ID NO: 249 and SEQ ID NO: 253; SEQ ID NO: 249 and SEQ ID NO: 254; SEQ ID NO: 249 and SEQ ID NO: 255; SEQ ID NO: 249 and SEQ ID NO: 256; SEQ ID NO: 249 and SEQ ID NO: 257; SEQ ID NO: 249 and SEQ ID NO: 258; SEQ ID NO: 249 and SEQ ID NO: 259; SEQ ID NO: 249 and SEQ ID NO: 260; SEQ ID NO: 249 and SEQ ID NO: 261; SEQ ID NO: 249 and SEQ ID NO: 262; SEQ ID NO: 249 and SEQ ID NO: 263; SEQ ID NO: 249 and SEQ ID NO: 264; SEQ ID NO: 249 and SEQ ID NO: 265; SEQ ID NO: 249 and SEQ ID NO: 266; SEQ ID NO: 249 and SEQ ID NO: 267; SEQ ID NO: 249 and SEQ ID NO: 268; SEQ ID NO: 249 and SEQ ID NO: 269; SEQ ID NO: 250 and SEQ ID NO: 251; SEQ ID NO: 250 and SEQ ID NO: 252; SEQ ID NO: 250 and SEQ ID NO: 253; SEQ ID NO: 250 and SEQ ID NO: 254; SEQ ID NO: 250 and SEQ ID NO: 255; SEQ ID NO: 250 and SEQ ID NO: 256; SEQ ID NO: 250 and SEQ ID NO: 257; SEQ ID NO: 250 and SEQ ID NO: 258; SEQ ID NO: 250 and SEQ ID NO: 259; SEQ ID NO: 250 and SEQ ID NO: 260; SEQ ID NO: 250 and SEQ ID NO: 261; SEQ ID NO: 250 and SEQ ID NO: 262; SEQ ID NO: 250 and SEQ ID NO: 263; SEQ ID NO: 250 and SEQ ID NO: 264; SEQ ID NO: 250 and SEQ ID NO: 265; SEQ ID NO: 250 and SEQ ID NO: 266; SEQ ID NO: 250 and SEQ ID NO: 267; SEQ ID NO: 250 and SEQ ID NO: 268; SEQ ID NO: 250 and SEQ ID NO: 269; SEQ ID NO: 251 and SEQ ID NO: 252; SEQ ID NO: 251 and SEQ ID NO: 253; SEQ ID NO: 251 and SEQ ID NO: 254; SEQ ID NO: 251 and SEQ ID NO: 255; SEQ ID NO: 251 and SEQ ID NO: 256; SEQ ID NO: 251 and SEQ ID NO: 257; SEQ ID NO: 251 and SEQ ID NO: 258; SEQ ID NO: 251 and SEQ ID NO: 259; SEQ ID NO: 251 and SEQ ID NO: 260; SEQ ID NO: 251 and SEQ ID NO: 261; SEQ ID NO: 251 and SEQ ID NO: 262; SEQ ID NO: 251 and SEQ ID NO: 263; SEQ ID NO: 251 and SEQ ID NO: 264; SEQ ID NO: 251 and SEQ ID NO: 265; SEQ ID NO: 251 and SEQ ID NO: 266; SEQ ID NO: 251 and SEQ ID NO: 267; SEQ ID NO: 251 and SEQ ID NO: 268; SEQ ID NO: 251 and SEQ ID NO: 269; SEQ ID NO: 252 and SEQ ID NO: 253; SEQ ID NO: 252 and SEQ ID NO: 254; SEQ ID NO: 252 and SEQ ID NO: 255; SEQ ID NO: 252 and SEQ ID NO: 256; SEQ ID NO: 252 and SEQ ID NO: 257; SEQ ID NO: 252 and SEQ ID NO: 258; SEQ ID NO: 252 and SEQ ID NO: 259; SEQ ID NO: 252 and SEQ ID NO: 260; SEQ ID NO: 252 and SEQ ID NO: 261; SEQ ID NO: 252 and SEQ ID NO: 262; SEQ ID NO: 252 and SEQ ID NO: 263; SEQ ID NO: 252 and SEQ ID NO: 264; SEQ ID NO: 252 and SEQ ID NO: 265; SEQ ID NO: 252 and SEQ ID NO: 266; SEQ ID NO: 252 and SEQ ID NO: 267; SEQ ID NO: 252 and SEQ ID NO: 268; SEQ ID NO: 252 and SEQ ID NO: 269; SEQ ID NO: 253 and SEQ ID NO: 254; SEQ ID NO: 253 and SEQ ID NO: 255; SEQ ID NO: 253 and SEQ ID NO: 256; SEQ ID NO: 253 and SEQ ID NO: 257; SEQ ID NO: 253 and SEQ ID NO: 258; SEQ ID NO: 253 and SEQ ID NO: 259; SEQ ID NO: 253 and SEQ ID NO: 260; SEQ ID NO: 253 and SEQ ID NO: 261; SEQ ID NO: 253 and SEQ ID NO: 262; SEQ ID NO: 253 and SEQ ID NO: 263; SEQ ID NO: 253 and SEQ ID NO: 264; SEQ ID NO: 253 and SEQ ID NO: 265; SEQ ID NO: 253 and SEQ ID NO: 266; SEQ ID NO: 253 and SEQ ID NO: 267; SEQ ID NO: 253 and SEQ ID NO: 268; SEQ ID NO: 253 and SEQ ID NO: 269; SEQ ID NO: 254 and SEQ ID NO: 255; SEQ ID NO: 254 and SEQ ID NO: 256; SEQ ID NO: 254 and SEQ ID NO: 257; SEQ ID NO: 254 and SEQ ID NO: 258; SEQ ID NO: 254 and SEQ ID NO: 259; SEQ ID NO: 254 and SEQ ID NO: 260; SEQ ID NO: 254 and SEQ ID NO: 261; SEQ ID NO: 254 and SEQ ID NO: 262; SEQ ID NO: 254 and SEQ ID NO: 263; SEQ ID NO: 254 and SEQ ID NO: 264; SEQ ID NO: 254 and SEQ ID NO: 265; SEQ ID NO: 254 and SEQ ID NO: 266; SEQ ID NO: 254 and SEQ ID NO: 267; SEQ ID NO: 254 and SEQ ID NO: 268; SEQ ID NO: 254 and SEQ ID NO: 269; SEQ ID NO: 255 and SEQ ID NO: 256; SEQ ID NO: 255 and SEQ ID NO: 257; SEQ ID NO: 255 and SEQ ID NO: 258; SEQ ID NO: 255 and SEQ ID NO: 259; SEQ ID NO: 255 and SEQ ID NO: 260; SEQ ID NO: 255 and SEQ ID NO: 261; SEQ ID NO: 255 and SEQ ID NO: 262; SEQ ID NO: 255 and SEQ ID NO: 263; SEQ ID NO: 255 and SEQ ID NO: 264; SEQ ID NO: 255 and SEQ ID NO: 265; SEQ ID NO: 255 and SEQ ID NO: 266; SEQ ID NO: 255 and SEQ ID NO: 267; SEQ ID NO: 255 and SEQ ID NO: 268; SEQ ID NO: 255 and SEQ ID NO: 269; SEQ ID NO: 256 and SEQ ID NO: 257; SEQ ID NO: 256 and SEQ ID NO: 258; SEQ ID NO: 256 and SEQ ID NO: 259; SEQ ID NO: 256 and SEQ ID NO: 260; SEQ ID NO: 256 and SEQ ID NO: 261; SEQ ID NO: 256 and SEQ ID NO: 262; SEQ ID NO: 256 and SEQ ID NO: 263; SEQ ID NO: 256 and SEQ ID NO: 264; SEQ ID NO: 256 and SEQ ID NO: 265; SEQ ID NO: 256 and SEQ ID NO: 266; SEQ ID NO: 256 and SEQ ID NO: 267; SEQ ID NO: 256 and SEQ ID NO: 268; SEQ ID NO: 256 and SEQ ID NO: 269; SEQ ID NO: 257 and SEQ ID NO: 258; SEQ ID NO: 257 and SEQ ID NO: 259; SEQ ID NO: 257 and SEQ ID NO: 260; SEQ ID NO: 257 and SEQ ID NO: 261; SEQ ID NO: 257 and SEQ ID NO: 262; SEQ ID NO: 257 and SEQ ID NO: 263; SEQ ID NO: 257 and SEQ ID NO: 264; SEQ ID NO: 257 and SEQ ID NO: 265; SEQ ID NO: 257 and SEQ ID NO: 266; SEQ ID NO: 257 and SEQ ID NO: 267; SEQ ID NO: 257 and SEQ ID NO: 268; SEQ ID NO: 257 and SEQ ID NO: 269; SEQ ID NO: 258 and SEQ ID NO: 259; SEQ ID NO: 258 and SEQ ID NO: 260; SEQ ID NO: 258 and SEQ ID NO: 261; SEQ ID NO: 258 and SEQ ID NO: 262; SEQ ID NO: 258 and SEQ ID NO: 263; SEQ ID NO: 258 and SEQ ID NO: 264; SEQ ID NO: 258 and SEQ ID NO: 265; SEQ ID NO: 258 and SEQ ID NO: 266; SEQ ID NO: 258 and SEQ ID NO: 267; SEQ ID NO: 258 and SEQ ID NO: 268; SEQ ID NO: 258 and SEQ ID NO: 269; SEQ ID NO: 259 and SEQ ID NO: 260; SEQ ID NO: 259 and SEQ ID NO: 261; SEQ ID NO: 259 and SEQ ID NO: 262; SEQ ID NO: 259 and SEQ ID NO: 263; SEQ ID NO: 259 and SEQ ID NO: 264; SEQ ID NO: 259 and SEQ ID NO: 265; SEQ ID NO: 259 and SEQ ID NO: 266; SEQ ID NO: 259 and SEQ ID NO: 267; SEQ ID NO: 259 and SEQ ID NO: 268; SEQ ID NO: 259 and SEQ ID NO: 269; SEQ ID NO: 260 and SEQ ID NO: 261; SEQ ID NO: 260 and SEQ ID NO: 262; SEQ ID NO: 260 and SEQ ID NO: 263; SEQ ID NO: 260 and SEQ ID NO: 264; SEQ ID NO: 260 and SEQ ID NO: 265; SEQ ID NO: 260 and SEQ ID NO: 266; SEQ ID NO: 260 and SEQ ID NO: 267; SEQ ID NO: 260 and SEQ ID NO: 268; SEQ ID NO: 260 and SEQ ID NO: 269; SEQ ID NO: 261 and SEQ ID NO: 262; SEQ ID NO: 261 and SEQ ID NO: 263; SEQ ID NO: 261 and SEQ ID NO: 264; SEQ ID NO: 261 and SEQ ID NO: 265; SEQ ID NO: 261 and SEQ ID NO: 266; SEQ ID NO: 261 and SEQ ID NO: 267; SEQ ID NO: 261 and SEQ ID NO: 268; SEQ ID NO: 261 and SEQ ID NO: 269; SEQ ID NO: 262 and SEQ ID NO: 263; SEQ ID NO: 262 and SEQ ID NO: 264; SEQ ID NO: 262 and SEQ ID NO: 265; SEQ ID NO: 262 and SEQ ID NO: 266; SEQ ID NO: 262 and SEQ ID NO: 267; SEQ ID NO: 262 and SEQ ID NO: 268; SEQ ID NO: 262 and SEQ ID NO: 269; SEQ ID NO: 263 and SEQ ID NO: 264; SEQ ID NO: 263 and SEQ ID NO: 265; SEQ ID NO: 263 and SEQ ID NO: 266; SEQ ID NO: 263 and SEQ ID NO: 267; SEQ ID NO: 263 and SEQ ID NO: 268; SEQ ID NO: 263 and SEQ ID NO: 269; SEQ ID NO: 264 and SEQ ID NO: 265; SEQ ID NO: 264 and SEQ ID NO: 266; SEQ ID NO: 264 and SEQ ID NO: 267; SEQ ID NO: 264 and SEQ ID NO: 268; SEQ ID NO: 264 and SEQ ID NO: 269; SEQ ID NO: 265 and SEQ ID NO: 266; SEQ ID NO: 265 and SEQ ID NO: 267; SEQ ID NO: 265 and SEQ ID NO: 268; SEQ ID NO: 265 and SEQ ID NO: 269; SEQ ID NO: 266 and SEQ ID NO: 267; SEQ ID NO: 266 and SEQ ID NO: 268; SEQ ID NO: 266 and SEQ ID NO: 269; SEQ ID NO: 267 and SEQ ID NO: 268; SEQ ID NO: 267 and SEQ ID NO: 269; and SEQ ID NO: 268 and SEQ ID NO: 269.

4. A composition comprising:
a. a single nucleic acid molecule comprising:
i. a nucleic acid molecule encoding Staphylococcus aureus Cas9 (SaCas9) or Staphylococcus lugdunensis (SluCas9) and at least one, at least two, or at least three guide RNAs; or
ii. a nucleic acid molecule encoding Staphylococcus aureus Cas9 (SaCas9) or Staphylococcus lugdunensis (SluCas9) and from one to n guide RNAs, wherein n is no more than the maximum number of guide RNAs that can be expressed from said nucleic acid molecule; or
iii. a nucleic acid molecule encoding Staphylococcus aureus Cas9 (SaCas9) or Staphylococcus lugdunensis (SluCas9) and 1, 2, or 3 guide RNAs;
wherein each guide RNA is selected from Table 2, optionally wherein the composition comprises at least one pair of guide RNAs, wherein the at least one pair is selected from any one of the pairs shown in Table 1B for SaCas9, or Table 1D for SluCas9; or
b. two nucleic acid molecules comprising:
i. a first nucleic acid molecule encoding Staphylococcus aureus Cas9 (SaCas9) or Staphylococcus lugdunensis (SluCas9); and
a second nucleic acid molecule that does not encode a SaCas9 or SluCas9 and encodes any one of the following:
1. at least one, at least two, at least three, at least four, at least five, or at least six guide RNAs; or
2. from one to n guide RNAs, wherein n is no more than the maximum number of guide RNAs that can be expressed from said nucleic acid molecule; or
3. from one to six guide RNAs; or
ii. a first nucleic acid molecule encoding Staphylococcus aureus Cas9 (SaCas9) or Staphylococcus lugdunensis (SluCas9) and
1. at least one, at least two, or at least three guide RNAs; or
2. from one to n guide RNAs, wherein n is no more than the maximum number of guide RNAs that can be expressed from said nucleic acid molecule; or
3. 1, 2, or 3 guide RNAs; and
a second nucleic acid molecule that does not encode a SaCas9 or SluCas9, optionally wherein the second nucleic acid molecule comprises any one of the following:
1. at least one, at least two, at least three, at least four, at least five, or at least six guide RNAs; or
2. from one to n guide RNAs, wherein n is no more than the maximum number of guide RNAs that can be expressed from said nucleic acid molecule; or
3. from one to six guide RNAs; or
iii. a first nucleic acid molecule encoding Staphylococcus aureus Cas9 (SaCas9) or Staphylococcus lugdunensis (SluCas9) and at least one, at least two, or at least three guide RNAs; and
a second nucleic acid molecule that does not encode a SaCas9 or SluCas9 and encodes from one to six guide RNAs; or
iv. a first nucleic acid encoding Staphylococcus aureus Cas9 (SaCas9) or Staphylococcus lugdunensis (SluCas9) and at least two guide RNAs, wherein a first guide RNA of the at least two guide RNAs binds upstream of a target sequence and a second guide RNA of the at least two guide RNAs binds downstream of the target sequence; and
a second nucleic acid molecule that does not encode a SaCas9 or SluCas9 and encodes at least one additional copy of each of the guide RNAs encoded in the first nucleic acid molecule;
wherein each guide RNA is selected from Table 2, optionally wherein the composition comprises at least one pair of guide RNAs selected from any one of the pairs of guide RNAs shown in Table 1B for SaCas9, or Table 1D for SluCas9.

5. The composition of any one of claims 1-4, comprising a pair of guide RNAs, wherein the pair of guide RNAs is capable of excising a DNA fragment from the DMD gene; wherein the DNA fragment is between 5 and 250 nucleotides in length.

6. The composition of claim 5, wherein the excised DNA fragment does not comprise an entire exon of the DMD gene.

7. A composition comprising a single nucleic acid molecule encoding a pair of guide RNAs and a Cas9, wherein the single nucleic acid molecule comprises:
a. a first nucleic acid molecule encoding a pair of guide RNAs comprising a first and second guide sequence, wherein the pair of guide sequences is selected from any one of the following pairs of SEQ ID NOs: 11 and 12; 11 and 13; 11 and 14; 11 and 15; 12 and 13; 12 and 14; 12 and 15; 13 and 14; 13 and 15; 14 and 15; 27 and 28; 27 and 29; 27 and 30; 27 and 31; 27 and 32; 27 and 33; 27 and 34; 27 and 35; 27 and 36; 27 and 37; 27 and 38; 27 and 39; 27 and 40; 27 and 41; 27 and 42; 27 and 43; 27 and 44; 27 and 45; 27 and 46; 27 and 47; 27 and 48; 27 and 53; 27 and 54; 27 and 55; 27 and 56; 27 and 57; 27 and 58; 27 and 59; 27 and 60; 27 and 61; 27 and 62; 27 and 63; 27 and 64; 27 and 65; 27 and 66; 27 and 67; 27 and 68; 27 and 69; 28 and 29; 28 and 30; 28 and 31; 28 and 32; 28 and 33; 28 and 34; 28 and 35; 28 and 36; 28 and 37; 28 and 38; 28 and 39; 28 and 40; 28 and 41; 28 and 42; 28 and 43; 28 and 44; 28 and 45; 28 and 46; 28 and 47; 28 and 48; 28 and 53; 28 and 54; 28 and 55; 28 and 56; 28 and 57; 28 and 58; 28 and 59; 28 and 60; 28 and 61; 28 and 62; 28 and 63; 28 and 64; 28 and 65; 28 and 66; 28 and 67; 28 and 68; 28 and 69; 29 and 30; 29 and 31; 29 and 32; 29 and 33; 29 and 34; 29 and 35; 29 and 36; 29 and 37; 29 and 38; 29 and 39; 29 and 40; 29 and 41; 29 and 42; 29 and 43; 29 and 44; 29 and 45; 29 and 46; 29 and 47; 29 and 48; 29 and 53; 29 and 54; 29 and 55; 29 and 56; 29 and 57; 29 and 58; 29 and 59; 29 and 60; 29 and 61; 29 and 62; 29 and 63; 29 and 64; 29 and 65; 29 and 66; 29 and 67; 29 and 68; 29 and 69; 30 and 31; 30 and 32; 30 and 33; 30 and 34; 30 and 35; 30 and 36; 30 and 37; 30 and 38; 30 and 39; 30 and 40; 30 and 41; 30 and 42; 30 and 43; 30 and 44; 30 and 45; 30 and 46; 30 and 47; 30 and 48; 30 and 53; 30 and 54; 30 and 55; 30 and 56; 30 and 57; 30 and 58; 30 and 59; 30 and 60; 30 and 61; 30 and 62; 30 and 63; 30 and 64; 30 and 65; 30 and 66; 30 and 67; 30 and 68; 30 and 69; 31 and 32; 31 and 33; 31 and 34; 31 and 35; 31 and 36; 31 and 37; 31 and 38; 31 and 39; 31 and 40; 31 and 41; 31 and 42; 31 and 43; 31 and 44; 31 and 45; 31 and 46; 31 and 47; 31 and 48; 31 and 53; 31 and 54; 31 and 55; 31 and 56; 31 and 57; 31 and 58; 31 and 59; 31 and 60; 31 and 61; 31 and 62; 31 and 63; 31 and 64; 31 and 65; 31 and 66; 31 and 67; 31 and 68; 31 and 69; 32 and 33; 32 and 34; 32 and 35; 32 and 36; 32 and 37; 32 and 38; 32 and 39; 32 and 40; 32 and 41; 32 and 42; 32 and 43; 32 and 44; 32 and 45; 32 and 46; 32 and 47; 32 and 48; 32 and 53; 32 and 54; 32 and 55; 32 and 56; 32 and 57; 32 and 58; 32 and 59; 32 and 60; 32 and 61; 32 and 62; 32 and 63; 32 and 64; 32 and 65; 32 and 66; 32 and 67; 32 and 68; 32 and 69; 33 and 34; 33 and 35; 33 and 36; 33 and 37; 33 and 38; 33 and 39; 33 and 40; 33 and 41; 33 and 42; 33 and 43; 33 and 44; 33 and 45; 33 and 46; 33 and 47; 33 and 48; 33 and 53; 33 and 54; 33 and 55; 33 and 56; 33 and 57; 33 and 58; 33 and 59; 33 and 60; 33 and 61; 33 and 62; 33 and 63; 33 and 64; 33 and 65; 33 and 66; 33 and 67; 33 and 68; 33 and 69; 34 and 35; 34 and 36; 34 and 37; 34 and 38; 34 and 39; 34 and 40; 34 and 41; 34 and 42; 34 and 43; 34 and 44; 34 and 45; 34 and 46; 34 and 47; 34 and 48; 34 and 53; 34 and 54; 34 and 55; 34 and 56; 34 and 57; 34 and 58; 34 and 59; 34 and 60; 34 and 61; 34 and 62; 34 and 63; 34 and 64; 34 and 65; 34 and 66; 34 and 67; 34 and 68; 34 and 69; 35 and 36; 35 and 37; 35 and 38; 35 and 39; 35 and 40; 35 and 41; 35 and 42; 35 and 43; 35 and 44; 35 and 45; 35 and 46; 35 and 47; 35 and 48; 35 and 53; 35 and 54; 35 and 55; 35 and 56; 35 and 57; 35 and 58; 35 and 59; 35 and 60; 35 and 61; 35 and 62; 35 and 63; 35 and 64; 35 and 65; 35 and 66; 35 and 67; 35 and 68; 35 and 69; 36 and 37; 36 and 38; 36 and 39; 36 and 40; 36 and 41; 36 and 42; 36 and 43; 36 and 44; 36 and 45; 36 and 46; 36 and 47; 36 and 48; 36 and 53; 36 and 54; 36 and 55; 36 and 56; 36 and 57; 36 and 58; 36 and 59; 36 and 60; 36 and 61; 36 and 62; 36 and 63; 36 and 64; 36 and 65; 36 and 66; 36 and 67; 36 and 68; 36 and 69; 37 and 38; 37 and 39; 37 and 40; 37 and 41; 37 and 42; 37 and 43; 37 and 44; 37 and 45; 37 and 46; 37 and 47; 37 and 48; 37 and 53; 37 and 54; 37 and 55; 37 and 56; 37 and 57; 37 and 58; 37 and 59; 37 and 60; 37 and 61; 37 and 62; 37 and 63; 37 and 64; 37 and 65; 37 and 66; 37 and 67; 37 and 68; 37 and 69; 38 and 39; 38 and 40; 38 and 41; 38 and 42; 38 and 43; 38 and 44; 38 and 45; 38 and 46; 38 and 47; 38 and 48; 38 and 53; 38 and 54; 38 and 55; 38 and 56; 38 and 57; 38 and 58; 38 and 59; 38 and 60; 38 and 61; 38 and 62; 38 and 63; 38 and 64; 38 and 65; 38 and 66; 38 and 67; 38 and 68; 38 and 69; 39 and 40; 39 and 41; 39 and 42; 39 and 43; 39 and 44; 39 and 45; 39 and 46; 39 and 47; 39 and 48; 39 and 53; 39 and 54; 39 and 55; 39 and 56; 39 and 57; 39 and 58; 39 and 59; 39 and 60; 39 and 61; 39 and 62; 39 and 63; 39 and 64; 39 and 65; 39 and 66; 39 and 67; 39 and 68; 39 and 69; 40 and 41; 40 and 42; 40 and 43; 40 and 44; 40 and 45; 40 and 46; 40 and 47; 40 and 48; 40 and 53; 40 and 54; 40 and 55; 40 and 56; 40 and 57; 40 and 58; 40 and 59; 40 and 60; 40 and 61; 40 and 62; 40 and 63; 40 and 64; 40 and 65; 40 and 66; 40 and 67; 40 and 68; 40 and 69; 41 and 42; 41 and 43; 41 and 44; 41 and 45; 41 and 46; 41 and 47; 41 and 48; 41 and 53; 41 and 54; 41 and 55; 41 and 56; 41 and 57; 41 and 58; 41 and 59; 41 and 60; 41 and 61; 41 and 62; 41 and 63; 41 and 64; 41 and 65; 41 and 66; 41 and 67; 41 and 68; 41 and 69; 42 and 43; 42 and 44; 42 and 45; 42 and 46; 42 and 47; 42 and 48; 42 and 53; 42 and 54; 42 and 55; 42 and 56; 42 and 57; 42 and 58; 42 and 59; 42 and 60; 42 and 61; 42 and 62; 42 and 63; 42 and 64; 42 and 65; 42 and 66; 42 and 67; 42 and 68; 42 and 69; 43 and 44; 43 and 45; 43 and 46; 43 and 47; 43 and 48; 43 and 53; 43 and 54; 43 and 55; 43 and 56; 43 and 57; 43 and 58; 43 and 59; 43 and 60; 43 and 61; 43 and 62; 43 and 63; 43 and 64; 43 and 65; 43 and 66; 43 and 67; 43 and 68; 43 and 69; 44 and 45; 44 and 46; 44 and 47; 44 and 48; 44 and 53; 44 and 54; 44 and 55; 44 and 56; 44 and 57; 44 and 58; 44 and 59; 44 and 60; 44 and 61; 44 and 62; 44 and 63; 44 and 64; 44 and 65; 44 and 66; 44 and 67; 44 and 68; 44 and 69; 45 and 46; 45 and 47; 45 and 48; 45 and 53; 45 and 54; 45 and 55; 45 and 56; 45 and 57; 45 and 58; 45 and 59; 45 and 60; 45 and 61; 45 and 62; 45 and 63; 45 and 64; 45 and 65; 45 and 66; 45 and 67; 45 and 68; 45 and 69; 46 and 47; 46 and 48; 46 and 53; 46 and 54; 46 and 55; 46 and 56; 46 and 57; 46 and 58; 46 and 59; 46 and 60; 46 and 61; 46 and 62; 46 and 63; 46 and 64; 46 and 65; 46 and 66; 46 and 67; 46 and 68; 46 and 69; 47 and 48; 47 and 53; 47 and 54; 47 and 55; 47 and 56; 47 and 57; 47 and 58; 47 and 59; 47 and 60; 47 and 61; 47 and 62; 47 and 63; 47 and 64; 47 and 65; 47 and 66; 47 and 67; 47 and 68; 47 and 69; 48 and 53; 48 and 54; 48 and 55; 48 and 56; 48 and 57; 48 and 58; 48 and 59; 48 and 60; 48 and 61; 48 and 62; 48 and 63; 48 and 64; 48 and 65; 48 and 66; 48 and 67; 48 and 68; 48 and 69; 53 and 54; 53 and 55; 53 and 56; 53 and 57; 53 and 58; 53 and 59; 53 and 60; 53 and 61; 53 and 62; 53 and 63; 53 and 64; 53 and 65; 53 and 66; 53 and 67; 53 and 68; 53 and 69; 54 and 55; 54 and 56; 54 and 57; 54 and 58; 54 and 59; 54 and 60; 54 and 61; 54 and 62; 54 and 63; 54 and 64; 54 and 65; 54 and 66; 54 and 67; 54 and 68; 54 and 69; 55 and 56; 55 and 57; 55 and 58; 55 and 59; 55 and 60; 55 and 61; 55 and 62; 55 and 63; 55 and 64; 55 and 65; 55 and 66; 55 and 67; 55 and 68; 55 and 69; 56 and 57; 56 and 58; 56 and 59; 56 and 60; 56 and 61; 56 and 62; 56 and 63; 56 and 64; 56 and 65; 56 and 66; 56 and 67; 56 and 68; 56 and 69; 57 and 58; 57 and 59; 57 and 60; 57 and 61; 57 and 62; 57 and 63; 57 and 64; 57 and 65; 57 and 66; 57 and 67; 57 and 68; 57 and 69; 58 and 59; 58 and 60; 58 and 61; 58 and 62; 58 and 63; 58 and 64; 58 and 65; 58 and 66; 58 and 67; 58 and 68; 58 and 69; 59 and 60; 59 and 61; 59 and 62; 59 and 63; 59 and 64; 59 and 65; 59 and 66; 59 and 67; 59 and 68; 59 and 69; 60 and 61; 60 and 62; 60 and 63; 60 and 64; 60 and 65; 60 and 66; 60 and 67; 60 and 68; 60 and 69; 61 and 62; 61 and 63; 61 and 64; 61 and 65; 61 and 66; 61 and 67; 61 and 68; 61 and 69; 62 and 63; 62 and 64; 62 and 65; 62 and 66; 62 and 67; 62 and 68; 62 and 69; 63 and 64; 63 and 65; 63 and 66; 63 and 67; 63 and 68; 63 and 69; 64 and 65; 64 and 66; 64 and 67; 64 and 68; 64 and 69; 65 and 66; 65 and 67; 65 and 68; 65 and 69; 66 and 67; 66 and 68; 66 and 69; 67 and 68; 67 and 69; 68 and 69; and a second nucleic acid molecule encoding a Staphylococcus aureus Cas9 (SaCas9); or
b. a first nucleic acid molecule encoding a pair of guide, wherein the pair of guide RNAs is selected from any one of the following pairs of SEQ ID NOs: 243 and 244; 243 and 245; 243 and 246; 243 and 247; 243 and 248; 243 and 249; 243 and 250; 243 and 251; 243 and 252; 243 and 253; 243 and 254; 243 and 255; 243 and 256; 243 and 257; 243 and 258; 243 and 259; 243 and 260; 243 and 261; 243 and 262; 243 and 263; 243 and 264; 243 and 265; 243 and 266; 243 and 267; 243 and 268; 243 and 269; 244 and 245; 244 and 246; 244 and 247; 244 and 248; 244 and 249; 244 and 250; 244 and 251; 244 and 252; 244 and 253; 244 and 254; 244 and 255; 244 and 256; 244 and 257; 244 and 258; 244 and 259; 244 and 260; 244 and 261; 244 and 262; 244 and 263; 244 and 264; 244 and 265; 244 and 266; 244 and 267; 244 and 268; 244 and 269; 245 and 246; 245 and 247; 245 and 248; 245 and 249; 245 and 250; 245 and 251; 245 and 252; 245 and 253; 245 and 254; 245 and 255; 245 and 256; 245 and 257; 245 and 258; 245 and 259; 245 and 260; 245 and 261; 245 and 262; 245 and 263; 245 and 264; 245 and 265; 245 and 266; 245 and 267; 245 and 268; 245 and 269; 246 and 247; 246 and 248; 246 and 249; 246 and 250; 246 and 251; 246 and 252; 246 and 253; 246 and 254; 246 and 255; 246 and 256; 246 and 257; 246 and 258; 246 and 259; 246 and 260; 246 and 261; 246 and 262; 246 and 263; 246 and 264; 246 and 265; 246 and 266; 246 and 267; 246 and 268; 246 and 269; 247 and 248; 247 and 249; 247 and 250; 247 and 251; 247 and 252; 247 and 253; 247 and 254; 247 and 255; 247 and 256; 247 and 257; 247 and 258; 247 and 259; 247 and 260; 247 and 261; 247 and 262; 247 and 263; 247 and 264; 247 and 265; 247 and 266; 247 and 267; 247 and 268; 247 and 269; 248 and 249; 248 and 250; 248 and 251; 248 and 252; 248 and 253; 248 and 254; 248 and 255; 248 and 256; 248 and 257; 248 and 258; 248 and 259; 248 and 260; 248 and 261; 248 and 262; 248 and 263; 248 and 264; 248 and 265; 248 and 266; 248 and 267; 248 and 268; 248 and 269; 249 and 250; 249 and 251; 249 and 252; 249 and 253; 249 and 254; 249 and 255; 249 and 256; 249 and 257; 249 and 258; 249 and 259; 249 and 260; 249 and 261; 249 and 262; 249 and 263; 249 and 264; 249 and 265; 249 and 266; 249 and 267; 249 and 268; 249 and 269; 250 and 251; 250 and 252; 250 and 253; 250 and 254; 250 and 255; 250 and 256; 250 and 257; 250 and 258; 250 and 259; 250 and 260; 250 and 261; 250 and 262; 250 and 263; 250 and 264; 250 and 265; 250 and 266; 250 and 267; 250 and 268; 250 and 269; 251 and 252; 251 and 253; 251 and 254; 251 and 255; 251 and 256; 251 and 257; 251 and 258; 251 and 259; 251 and 260; 251 and 261; 251 and 262; 251 and 263; 251 and 264; 251 and 265; 251 and 266; 251 and 267; 251 and 268; 251 and 269; 252 and 253; 252 and 254; 252 and 255; 252 and 256; 252 and 257; 252 and 258; 252 and 259; 252 and 260; 252 and 261; 252 and 262; 252 and 263; 252 and 264; 252 and 265; 252 and 266; 252 and 267; 252 and 268; 252 and 269; 253 and 254; 253 and 255; 253 and 256; 253 and 257; 253 and 258; 253 and 259; 253 and 260; 253 and 261; 253 and 262; 253 and 263; 253 and 264; 253 and 265; 253 and 266; 253 and 267; 253 and 268; 253 and 269; 254 and 255; 254 and 256; 254 and 257; 254 and 258; 254 and 259; 254 and 260; 254 and 261; 254 and 262; 254 and 263; 254 and 264; 254 and 265; 254 and 266; 254 and 267; 254 and 268; 254 and 269; 255 and 256; 255 and 257; 255 and 258; 255 and 259; 255 and 260; 255 and 261; 255 and 262; 255 and 263; 255 and 264; 255 and 265; 255 and 266; 255 and 267; 255 and 268; 255 and 269; 256 and 257; 256 and 258; 256 and 259; 256 and 260; 256 and 261; 256 and 262; 256 and 263; 256 and 264; 256 and 265; 256 and 266; 256 and 267; 256 and 268; 256 and 269; 257 and 258; 257 and 259; 257 and 260; 257 and 261; 257 and 262; 257 and 263; 257 and 264; 257 and 265; 257 and 266; 257 and 267; 257 and 268; 257 and 269; 258 and 259; 258 and 260; 258 and 261; 258 and 262; 258 and 263; 258 and 264; 258 and 265; 258 and 266; 258 and 267; 258 and 268; 258 and 269; 259 and 260; 259 and 261; 259 and 262; 259 and 263; 259 and 264; 259 and 265; 259 and 266; 259 and 267; 259 and 268; 259 and 269; 260 and 261; 260 and 262; 260 and 263; 260 and 264; 260 and 265; 260 and 266; 260 and 267; 260 and 268; 260 and 269; 261 and 262; 261 and 263; 261 and 264; 261 and 265; 261 and 266; 261 and 267; 261 and 268; 261 and 269; 262 and 263; 262 and 264; 262 and 265; 262 and 266; 262 and 267; 262 and 268; 262 and 269; 263 and 264; 263 and 265; 263 and 266; 263 and 267; 263 and 268; 263 and 269; 264 and 265; 264 and 266; 264 and 267; 264 and 268; 264 and 269; 265 and 266; 265 and 267; 265 and 268; 265 and 269; 266 and 267; 266 and 268; 266 and 269; 267 and 268; 267 and 269; 268 and 269; and a second nucleic acid molecule encoding a Staphylococcus lugdunensis (SluCas9); or
c. a first nucleic acid molecule encoding a pair of guide RNAs selected from any one of the following pairs of guide RNAs targeting exon 51: SEQ ID NOs: 28 and 57; 31 and 57; 31 and 46; 32 and 69; 33 and 57; 33 and 69; 34 and 57; 36 and 69; 37 and 69; 37 and 46; 39 and 46; 40 and 46; 46 and 35; 46 and 62; 46 and 65; 46 and 67; 47 and 57; 48 and 57; 49 and 57; 51 and 57; 53 and 46; 54 and 46; 55 and 46; 58 and 46; 59 and 46; 60 and 46; 61 and 69; or 69 and 30; and a second nucleic acid molecule encoding a Staphylococcus aureus Cas9 (SaCas9);
d. a first nucleic acid molecule encoding a pair of guide RNAs selected from any one of the following pairs of guide RNAs targeting exon 51: SEQ ID NOs: 243 and 252; 245 and 252; 252 and 253; 252 and 254; 252 and 256; 252 and 257; 252 and 258; 252 and 262; 252 and 264; 252 and 265; or 252 and 266; and a second nucleic acid molecule encoding a Staphylococcus lugdunensis (SluCas9); or
e. a first nucleic acid molecule encoding a pair of guide RNAs selected from any one of the following pairs of guide RNAs targeting exon 51: SEQ ID NOs: 269 and 247; 252 and 254; 269 and 249; 252 and 262; or 252 and 264; and a second nucleic acid molecule encoding a Staphylococcus lugdunensis (SluCas9).

8. A composition comprising one or more nucleic acid molecules encoding a Staphylococcus aureus Cas9 (SaCas9) and a first and a second guide RNA, wherein the first and the second guide RNAs target different sequences in a DMD gene, wherein the first and the second guide RNAs each comprise a sequence that is at least 90% identical to a first and a second guide sequence selected from any one of the following pairs of first and second guide sequences: SEQ ID NOs: 28 and 57; 31 and 57; 31 and 46; 32 and 69; 33 and 57; 33 and 69; 34 and 57; 36 and 69; 37 and 69; 37 and 46; 39 and 46; 40 and 46; 46 and 35; 46 and 62; 46 and 65; 46 and 67; 47 and 57; 48 and 57; 49 and 57; 51 and 57; 53 and 46; 54 and 46; 55 and 46; 58 and 46; 59 and 46; 60 and 46; 61 and 69; or 69 and 30.

9. A composition comprising one or more nucleic acid molecules encoding a Staphylococcus lugdunensis (SluCas9) and a first and a second guide RNA, wherein the first and the second guide RNAs target different sequences in a DMD gene, wherein the first and the second guide RNA each comprise a sequence that is at least 90% identical to a first and a second guide sequence selected from any one of the following pairs of SEQ ID NOs: 243 and 252; 245 and 252; 252 and 253; 252 and 254; 252 and 256; 252 and 257; 252 and 258; 252 and 262; 252 and 264; 252 and 265; or 252 and 266.

10. A composition comprising one or more nucleic acid molecules encoding an endonuclease and at least two guide RNAs, wherein the at least two guide RNAs each target a different sequence in a DMD gene, wherein the at least two guide RNAs each comprise a sequence that is at least 90% identical to a first and a second guide sequence selected from any one of the following pairs of SEQ ID NOs: 11 and 12; 11 and 13; 11 and 14; 11 and 15; 12 and 13; 12 and 14; 12 and 15; 13 and 14; 13 and 15; 14 and 15; 27 and 28; 27 and 29; 27 and 30; 27 and 31; 27 and 32; 27 and 33; 27 and 34; 27 and 35; 27 and 36; 27 and 37; 27 and 38; 27 and 39; 27 and 40; 27 and 41; 27 and 42; 27 and 43; 27 and 44; 27 and 45; 27 and 46; 27 and 47; 27 and 48; 27 and 53; 27 and 54; 27 and 55; 27 and 56; 27 and 57; 27 and 58; 27 and 59; 27 and 60; 27 and 61; 27 and 62; 27 and 63; 27 and 64; 27 and 65; 27 and 66; 27 and 67; 27 and 68; 27 and 69; 28 and 29; 28 and 30; 28 and 31; 28 and 32; 28 and 33; 28 and 34; 28 and 35; 28 and 36; 28 and 37; 28 and 38; 28 and 39; 28 and 40; 28 and 41; 28 and 42; 28 and 43; 28 and 44; 28 and 45; 28 and 46; 28 and 47; 28 and 48; 28 and 53; 28 and 54; 28 and 55; 28 and 56; 28 and 57; 28 and 58; 28 and 59; 28 and 60; 28 and 61; 28 and 62; 28 and 63; 28 and 64; 28 and 65; 28 and 66; 28 and 67; 28 and 68; 28 and 69; 29 and 30; 29 and 31; 29 and 32; 29 and 33; 29 and 34; 29 and 35; 29 and 36; 29 and 37; 29 and 38; 29 and 39; 29 and 40; 29 and 41; 29 and 42; 29 and 43; 29 and 44; 29 and 45; 29 and 46; 29 and 47; 29 and 48; 29 and 53; 29 and 54; 29 and 55; 29 and 56; 29 and 57; 29 and 58; 29 and 59; 29 and 60; 29 and 61; 29 and 62; 29 and 63; 29 and 64; 29 and 65; 29 and 66; 29 and 67; 29 and 68; 29 and 69; 30 and 31; 30 and 32; 30 and 33; 30 and 34; 30 and 35; 30 and 36; 30 and 37; 30 and 38; 30 and 39; 30 and 40; 30 and 41; 30 and 42; 30 and 43; 30 and 44; 30 and 45; 30 and 46; 30 and 47; 30 and 48; 30 and 53; 30 and 54; 30 and 55; 30 and 56; 30 and 57; 30 and 58; 30 and 59; 30 and 60; 30 and 61; 30 and 62; 30 and 63; 30 and 64; 30 and 65; 30 and 66; 30 and 67; 30 and 68; 30 and 69; 31 and 32; 31 and 33; 31 and 34; 31 and 35; 31 and 36; 31 and 37; 31 and 38; 31 and 39; 31 and 40; 31 and 41; 31 and 42; 31 and 43; 31 and 44; 31 and 45; 31 and 46; 31 and 47; 31 and 48; 31 and 53; 31 and 54; 31 and 55; 31 and 56; 31 and 57; 31 and 58; 31 and 59; 31 and 60; 31 and 61; 31 and 62; 31 and 63; 31 and 64; 31 and 65; 31 and 66; 31 and 67; 31 and 68; 31 and 69; 32 and 33; 32 and 34; 32 and 35; 32 and 36; 32 and 37; 32 and 38; 32 and 39; 32 and 40; 32 and 41; 32 and 42; 32 and 43; 32 and 44; 32 and 45; 32 and 46; 32 and 47; 32 and 48; 32 and 53; 32 and 54; 32 and 55; 32 and 56; 32 and 57; 32 and 58; 32 and 59; 32 and 60; 32 and 61; 32 and 62; 32 and 63; 32 and 64; 32 and 65; 32 and 66; 32 and 67; 32 and 68; 32 and 69; 33 and 34; 33 and 35; 33 and 36; 33 and 37; 33 and 38; 33 and 39; 33 and 40; 33 and 41; 33 and 42; 33 and 43; 33 and 44; 33 and 45; 33 and 46; 33 and 47; 33 and 48; 33 and 53; 33 and 54; 33 and 55; 33 and 56; 33 and 57; 33 and 58; 33 and 59; 33 and 60; 33 and 61; 33 and 62; 33 and 63; 33 and 64; 33 and 65; 33 and 66; 33 and 67; 33 and 68; 33 and 69; 34 and 35; 34 and 36; 34 and 37; 34 and 38; 34 and 39; 34 and 40; 34 and 41; 34 and 42; 34 and 43; 34 and 44; 34 and 45; 34 and 46; 34 and 47; 34 and 48; 34 and 53; 34 and 54; 34 and 55; 34 and 56; 34 and 57; 34 and 58; 34 and 59; 34 and 60; 34 and 61; 34 and 62; 34 and 63; 34 and 64; 34 and 65; 34 and 66; 34 and 67; 34 and 68; 34 and 69; 35 and 36; 35 and 37; 35 and 38; 35 and 39; 35 and 40; 35 and 41; 35 and 42; 35 and 43; 35 and 44; 35 and 45; 35 and 46; 35 and 47; 35 and 48; 35 and 53; 35 and 54; 35 and 55; 35 and 56; 35 and 57; 35 and 58; 35 and 59; 35 and 60; 35 and 61; 35 and 62; 35 and 63; 35 and 64; 35 and 65; 35 and 66; 35 and 67; 35 and 68; 35 and 69; 36 and 37; 36 and 38; 36 and 39; 36 and 40; 36 and 41; 36 and 42; 36 and 43; 36 and 44; 36 and 45; 36 and 46; 36 and 47; 36 and 48; 36 and 53; 36 and 54; 36 and 55; 36 and 56; 36 and 57; 36 and 58; 36 and 59; 36 and 60; 36 and 61; 36 and 62; 36 and 63; 36 and 64; 36 and 65; 36 and 66; 36 and 67; 36 and 68; 36 and 69; 37 and 38; 37 and 39; 37 and 40; 37 and 41; 37 and 42; 37 and 43; 37 and 44; 37 and 45; 37 and 46; 37 and 47; 37 and 48; 37 and 53; 37 and 54; 37 and 55; 37 and 56; 37 and 57; 37 and 58; 37 and 59; 37 and 60; 37 and 61; 37 and 62; 37 and 63; 37 and 64; 37 and 65; 37 and 66; 37 and 67; 37 and 68; 37 and 69; 38 and 39; 38 and 40; 38 and 41; 38 and 42; 38 and 43; 38 and 44; 38 and 45; 38 and 46; 38 and 47; 38 and 48; 38 and 53; 38 and 54; 38 and 55; 38 and 56; 38 and 57; 38 and 58; 38 and 59; 38 and 60; 38 and 61; 38 and 62; 38 and 63; 38 and 64; 38 and 65; 38 and 66; 38 and 67; 38 and 68; 38 and 69; 39 and 40; 39 and 41; 39 and 42; 39 and 43; 39 and 44; 39 and 45; 39 and 46; 39 and 47; 39 and 48; 39 and 53; 39 and 54; 39 and 55; 39 and 56; 39 and 57; 39 and 58; 39 and 59; 39 and 60; 39 and 61; 39 and 62; 39 and 63; 39 and 64; 39 and 65; 39 and 66; 39 and 67; 39 and 68; 39 and 69; 40 and 41; 40 and 42; 40 and 43; 40 and 44; 40 and 45; 40 and 46; 40 and 47; 40 and 48; 40 and 53; 40 and 54; 40 and 55; 40 and 56; 40 and 57; 40 and 58; 40 and 59; 40 and 60; 40 and 61; 40 and 62; 40 and 63; 40 and 64; 40 and 65; 40 and 66; 40 and 67; 40 and 68; 40 and 69; 41 and 42; 41 and 43; 41 and 44; 41 and 45; 41 and 46; 41 and 47; 41 and 48; 41 and 53; 41 and 54; 41 and 55; 41 and 56; 41 and 57; 41 and 58; 41 and 59; 41 and 60; 41 and 61; 41 and 62; 41 and 63; 41 and 64; 41 and 65; 41 and 66; 41 and 67; 41 and 68; 41 and 69; 42 and 43; 42 and 44; 42 and 45; 42 and 46; 42 and 47; 42 and 48; 42 and 53; 42 and 54; 42 and 55; 42 and 56; 42 and 57; 42 and 58; 42 and 59; 42 and 60; 42 and 61; 42 and 62; 42 and 63; 42 and 64; 42 and 65; 42 and 66; 42 and 67; 42 and 68; 42 and 69; 43 and 44; 43 and 45; 43 and 46; 43 and 47; 43 and 48; 43 and 53; 43 and 54; 43 and 55; 43 and 56; 43 and 57; 43 and 58; 43 and 59; 43 and 60; 43 and 61; 43 and 62; 43 and 63; 43 and 64; 43 and 65; 43 and 66; 43 and 67; 43 and 68; 43 and 69; 44 and 45; 44 and 46; 44 and 47; 44 and 48; 44 and 53; 44 and 54; 44 and 55; 44 and 56; 44 and 57; 44 and 58; 44 and 59; 44 and 60; 44 and 61; 44 and 62; 44 and 63; 44 and 64; 44 and 65; 44 and 66; 44 and 67; 44 and 68; 44 and 69; 45 and 46; 45 and 47; 45 and 48; 45 and 53; 45 and 54; 45 and 55; 45 and 56; 45 and 57; 45 and 58; 45 and 59; 45 and 60; 45 and 61; 45 and 62; 45 and 63; 45 and 64; 45 and 65; 45 and 66; 45 and 67; 45 and 68; 45 and 69; 46 and 47; 46 and 48; 46 and 53; 46 and 54; 46 and 55; 46 and 56; 46 and 57; 46 and 58; 46 and 59; 46 and 60; 46 and 61; 46 and 62; 46 and 63; 46 and 64; 46 and 65; 46 and 66; 46 and 67; 46 and 68; 46 and 69; 47 and 48; 47 and 53; 47 and 54; 47 and 55; 47 and 56; 47 and 57; 47 and 58; 47 and 59; 47 and 60; 47 and 61; 47 and 62; 47 and 63; 47 and 64; 47 and 65; 47 and 66; 47 and 67; 47 and 68; 47 and 69; 48 and 53; 48 and 54; 48 and 55; 48 and 56; 48 and 57; 48 and 58; 48 and 59; 48 and 60; 48 and 61; 48 and 62; 48 and 63; 48 and 64; 48 and 65; 48 and 66; 48 and 67; 48 and 68; 48 and 69; 53 and 54; 53 and 55; 53 and 56; 53 and 57; 53 and 58; 53 and 59; 53 and 60; 53 and 61; 53 and 62; 53 and 63; 53 and 64; 53 and 65; 53 and 66; 53 and 67; 53 and 68; 53 and 69; 54 and 55; 54 and 56; 54 and 57; 54 and 58; 54 and 59; 54 and 60; 54 and 61; 54 and 62; 54 and 63; 54 and 64; 54 and 65; 54 and 66; 54 and 67; 54 and 68; 54 and 69; 55 and 56; 55 and 57; 55 and 58; 55 and 59; 55 and 60; 55 and 61; 55 and 62; 55 and 63; 55 and 64; 55 and 65; 55 and 66; 55 and 67; 55 and 68; 55 and 69; 56 and 57; 56 and 58; 56 and 59; 56 and 60; 56 and 61; 56 and 62; 56 and 63; 56 and 64; 56 and 65; 56 and 66; 56 and 67; 56 and 68; 56 and 69; 57 and 58; 57 and 59; 57 and 60; 57 and 61; 57 and 62; 57 and 63; 57 and 64; 57 and 65; 57 and 66; 57 and 67; 57 and 68; 57 and 69; 58 and 59; 58 and 60; 58 and 61; 58 and 62; 58 and 63; 58 and 64; 58 and 65; 58 and 66; 58 and 67; 58 and 68; 58 and 69; 59 and 60; 59 and 61; 59 and 62; 59 and 63; 59 and 64; 59 and 65; 59 and 66; 59 and 67; 59 and 68; 59 and 69; 60 and 61; 60 and 62; 60 and 63; 60 and 64; 60 and 65; 60 and 66; 60 and 67; 60 and 68; 60 and 69; 61 and 62; 61 and 63; 61 and 64; 61 and 65; 61 and 66; 61 and 67; 61 and 68; 61 and 69; 62 and 63; 62 and 64; 62 and 65; 62 and 66; 62 and 67; 62 and 68; 62 and 69; 63 and 64; 63 and 65; 63 and 66; 63 and 67; 63 and 68; 63 and 69; 64 and 65; 64 and 66; 64 and 67; 64 and 68; 64 and 69; 65 and 66; 65 and 67; 65 and 68; 65 and 69; 66 and 67; 66 and 68; 66 and 69; 67 and 68; 67 and 69; or 68 and 69; and
a second nucleic acid molecule encoding a SaCas9.

11. A composition comprising one or more nucleic acid molecules encoding an endonuclease and at least two guide RNAs, wherein the at least two guide RNAs each target a different sequence in a DMD gene, wherein the at least two guide RNAs each comprise a sequence that is at least 90% identical to a first and a second guide sequence, wherein the first and the second guide sequences are selected from any one of the following pairs of SEQ ID NOs: 243 and 244; 243 and 245; 243 and 246; 243 and 247; 243 and 248; 243 and 249; 243 and 250; 243 and 251; 243 and 252; 243 and 253; 243 and 254; 243 and 255; 243 and 256; 243 and 257; 243 and 258; 243 and 259; 243 and 260; 243 and 261; 243 and 262; 243 and 263; 243 and 264; 243 and 265; 243 and 266; 243 and 267; 243 and 268; 243 and 269; 244 and 245; 244 and 246; 244 and 247; 244 and 248; 244 and 249; 244 and 250; 244 and 251; 244 and 252; 244 and 253; 244 and 254; 244 and 255; 244 and 256; 244 and 257; 244 and 258; 244 and 259; 244 and 260; 244 and 261; 244 and 262; 244 and 263; 244 and 264; 244 and 265; 244 and 266; 244 and 267; 244 and 268; 244 and 269; 245 and 246; 245 and 247; 245 and 248; 245 and 249; 245 and 250; 245 and 251; 245 and 252; 245 and 253; 245 and 254; 245 and 255; 245 and 256; 245 and 257; 245 and 258; 245 and 259; 245 and 260; 245 and 261; 245 and 262; 245 and 263; 245 and 264; 245 and 265; 245 and 266; 245 and 267; 245 and 268; 245 and 269; 246 and 247; 246 and 248; 246 and 249; 246 and 250; 246 and 251; 246 and 252; 246 and 253; 246 and 254; 246 and 255; 246 and 256; 246 and 257; 246 and 258; 246 and 259; 246 and 260; 246 and 261; 246 and 262; 246 and 263; 246 and 264; 246 and 265; 246 and 266; 246 and 267; 246 and 268; 246 and 269; 247 and 248; 247 and 249; 247 and 250; 247 and 251; 247 and 252; 247 and 253; 247 and 254; 247 and 255; 247 and 256; 247 and 257; 247 and 258; 247 and 259; 247 and 260; 247 and 261; 247 and 262; 247 and 263; 247 and 264; 247 and 265; 247 and 266; 247 and 267; 247 and 268; 247 and 269; 248 and 249; 248 and 250; 248 and 251; 248 and 252; 248 and 253; 248 and 254; 248 and 255; 248 and 256; 248 and 257; 248 and 258; 248 and 259; 248 and 260; 248 and 261; 248 and 262; 248 and 263; 248 and 264; 248 and 265; 248 and 266; 248 and 267; 248 and 268; 248 and 269; 249 and 250; 249 and 251; 249 and 252; 249 and 253; 249 and 254; 249 and 255; 249 and 256; 249 and 257; 249 and 258; 249 and 259; 249 and 260; 249 and 261; 249 and 262; 249 and 263; 249 and 264; 249 and 265; 249 and 266; 249 and 267; 249 and 268; 249 and 269; 250 and 251; 250 and 252; 250 and 253; 250 and 254; 250 and 255; 250 and 256; 250 and 257; 250 and 258; 250 and 259; 250 and 260; 250 and 261; 250 and 262; 250 and 263; 250 and 264; 250 and 265; 250 and 266; 250 and 267; 250 and 268; 250 and 269; 251 and 252; 251 and 253; 251 and 254; 251 and 255; 251 and 256; 251 and 257; 251 and 258; 251 and 259; 251 and 260; 251 and 261; 251 and 262; 251 and 263; 251 and 264; 251 and 265; 251 and 266; 251 and 267; 251 and 268; 251 and 269; 252 and 253; 252 and 254; 252 and 255; 252 and 256; 252 and 257; 252 and 258; 252 and 259; 252 and 260; 252 and 261; 252 and 262; 252 and 263; 252 and 264; 252 and 265; 252 and 266; 252 and 267; 252 and 268; 252 and 269; 253 and 254; 253 and 255; 253 and 256; 253 and 257; 253 and 258; 253 and 259; 253 and 260; 253 and 261; 253 and 262; 253 and 263; 253 and 264; 253 and 265; 253 and 266; 253 and 267; 253 and 268; 253 and 269; 254 and 255; 254 and 256; 254 and 257; 254 and 258; 254 and 259; 254 and 260; 254 and 261; 254 and 262; 254 and 263; 254 and 264; 254 and 265; 254 and 266; 254 and 267; 254 and 268; 254 and 269; 255 and 256; 255 and 257; 255 and 258; 255 and 259; 255 and 260; 255 and 261; 255 and 262; 255 and 263; 255 and 264; 255 and 265; 255 and 266; 255 and 267; 255 and 268; 255 and 269; 256 and 257; 256 and 258; 256 and 259; 256 and 260; 256 and 261; 256 and 262; 256 and 263; 256 and 264; 256 and 265; 256 and 266; 256 and 267; 256 and 268; 256 and 269; 257 and 258; 257 and 259; 257 and 260; 257 and 261; 257 and 262; 257 and 263; 257 and 264; 257 and 265; 257 and 266; 257 and 267; 257 and 268; 257 and 269; 258 and 259; 258 and 260; 258 and 261; 258 and 262; 258 and 263; 258 and 264; 258 and 265; 258 and 266; 258 and 267; 258 and 268; 258 and 269; 259 and 260; 259 and 261; 259 and 262; 259 and 263; 259 and 264; 259 and 265; 259 and 266; 259 and 267; 259 and 268; 259 and 269; 260 and 261; 260 and 262; 260 and 263; 260 and 264; 260 and 265; 260 and 266; 260 and 267; 260 and 268; 260 and 269; 261 and 262; 261 and 263; 261 and 264; 261 and 265; 261 and 266; 261 and 267; 261 and 268; 261 and 269; 262 and 263; 262 and 264; 262 and 265; 262 and 266; 262 and 267; 262 and 268; 262 and 269; 263 and 264; 263 and 265; 263 and 266; 263 and 267; 263 and 268; 263 and 269; 264 and 265; 264 and 266; 264 and 267; 264 and 268; 264 and 269; 265 and 266; 265 and 267; 265 and 268; 265 and 269; 266 and 267; 266 and 268; 266 and 269; 267 and 268; 267 and 269; 268 and 269; and
a second nucleic acid molecule encoding a SluCas9.

12. A composition comprising a first and a second nucleic acid molecule, wherein the first nucleic acid molecule encodes a Staphylococcus aureus Cas9 (SaCas9) endonuclease and optionally a first or a first and second guide RNA, and the second nucleic acid molecule comprises a first or a first and second guide RNA, wherein the first guide RNA comprises a first sequence and the second guide RNA comprises a second sequence, and wherein the first sequence and the second sequence are selected from any one the following pairs of SEQ ID NOs: 11 and 12; 11 and 13; 11 and 14; 11 and 15; 12 and 13; 12 and 14; 12 and 15; 13 and 14; 13 and 15; 14 and 15; 27 and 28; 27 and 29; 27 and 30; 27 and 31; 27 and 32; 27 and 33; 27 and 34; 27 and 35; 27 and 36; 27 and 37; 27 and 38; 27 and 39; 27 and 40; 27 and 41; 27 and 42; 27 and 43; 27 and 44; 27 and 45; 27 and 46; 27 and 47; 27 and 48; 27 and 53; 27 and 54; 27 and 55; 27 and 56; 27 and 57; 27 and 58; 27 and 59; 27 and 60; 27 and 61; 27 and 62; 27 and 63; 27 and 64; 27 and 65; 27 and 66; 27 and 67; 27 and 68; 27 and 69; 28 and 29; 28 and 30; 28 and 31; 28 and 32; 28 and 33; 28 and 34; 28 and 35; 28 and 36; 28 and 37; 28 and 38; 28 and 39; 28 and 40; 28 and 41; 28 and 42; 28 and 43; 28 and 44; 28 and 45; 28 and 46; 28 and 47; 28 and 48; 28 and 53; 28 and 54; 28 and 55; 28 and 56; 28 and 57; 28 and 58; 28 and 59; 28 and 60; 28 and 61; 28 and 62; 28 and 63; 28 and 64; 28 and 65; 28 and 66; 28 and 67; 28 and 68; 28 and 69; 29 and 30; 29 and 31; 29 and 32; 29 and 33; 29 and 34; 29 and 35; 29 and 36; 29 and 37; 29 and 38; 29 and 39; 29 and 40; 29 and 41; 29 and 42; 29 and 43; 29 and 44; 29 and 45; 29 and 46; 29 and 47; 29 and 48; 29 and 53; 29 and 54; 29 and 55; 29 and 56; 29 and 57; 29 and 58; 29 and 59; 29 and 60; 29 and 61; 29 and 62; 29 and 63; 29 and 64; 29 and 65; 29 and 66; 29 and 67; 29 and 68; 29 and 69; 30 and 31; 30 and 32; 30 and 33; 30 and 34; 30 and 35; 30 and 36; 30 and 37; 30 and 38; 30 and 39; 30 and 40; 30 and 41; 30 and 42; 30 and 43; 30 and 44; 30 and 45; 30 and 46; 30 and 47; 30 and 48; 30 and 53; 30 and 54; 30 and 55; 30 and 56; 30 and 57; 30 and 58; 30 and 59; 30 and 60; 30 and 61; 30 and 62; 30 and 63; 30 and 64; 30 and 65; 30 and 66; 30 and 67; 30 and 68; 30 and 69; 31 and 32; 31 and 33; 31 and 34; 31 and 35; 31 and 36; 31 and 37; 31 and 38; 31 and 39; 31 and 40; 31 and 41; 31 and 42; 31 and 43; 31 and 44; 31 and 45; 31 and 46; 31 and 47; 31 and 48; 31 and 53; 31 and 54; 31 and 55; 31 and 56; 31 and 57; 31 and 58; 31 and 59; 31 and 60; 31 and 61; 31 and 62; 31 and 63; 31 and 64; 31 and 65; 31 and 66; 31 and 67; 31 and 68; 31 and 69; 32 and 33; 32 and 34; 32 and 35; 32 and 36; 32 and 37; 32 and 38; 32 and 39; 32 and 40; 32 and 41; 32 and 42; 32 and 43; 32 and 44; 32 and 45; 32 and 46; 32 and 47; 32 and 48; 32 and 53; 32 and 54; 32 and 55; 32 and 56; 32 and 57; 32 and 58; 32 and 59; 32 and 60; 32 and 61; 32 and 62; 32 and 63; 32 and 64; 32 and 65; 32 and 66; 32 and 67; 32 and 68; 32 and 69; 33 and 34; 33 and 35; 33 and 36; 33 and 37; 33 and 38; 33 and 39; 33 and 40; 33 and 41; 33 and 42; 33 and 43; 33 and 44; 33 and 45; 33 and 46; 33 and 47; 33 and 48; 33 and 53; 33 and 54; 33 and 55; 33 and 56; 33 and 57; 33 and 58; 33 and 59; 33 and 60; 33 and 61; 33 and 62; 33 and 63; 33 and 64; 33 and 65; 33 and 66; 33 and 67; 33 and 68; 33 and 69; 34 and 35; 34 and 36; 34 and 37; 34 and 38; 34 and 39; 34 and 40; 34 and 41; 34 and 42; 34 and 43; 34 and 44; 34 and 45; 34 and 46; 34 and 47; 34 and 48; 34 and 53; 34 and 54; 34 and 55; 34 and 56; 34 and 57; 34 and 58; 34 and 59; 34 and 60; 34 and 61; 34 and 62; 34 and 63; 34 and 64; 34 and 65; 34 and 66; 34 and 67; 34 and 68; 34 and 69; 35 and 36; 35 and 37; 35 and 38; 35 and 39; 35 and 40; 35 and 41; 35 and 42; 35 and 43; 35 and 44; 35 and 45; 35 and 46; 35 and 47; 35 and 48; 35 and 53; 35 and 54; 35 and 55; 35 and 56; 35 and 57; 35 and 58; 35 and 59; 35 and 60; 35 and 61; 35 and 62; 35 and 63; 35 and 64; 35 and 65; 35 and 66; 35 and 67; 35 and 68; 35 and 69; 36 and 37; 36 and 38; 36 and 39; 36 and 40; 36 and 41; 36 and 42; 36 and 43; 36 and 44; 36 and 45; 36 and 46; 36 and 47; 36 and 48; 36 and 53; 36 and 54; 36 and 55; 36 and 56; 36 and 57; 36 and 58; 36 and 59; 36 and 60; 36 and 61; 36 and 62; 36 and 63; 36 and 64; 36 and 65; 36 and 66; 36 and 67; 36 and 68; 36 and 69; 37 and 38; 37 and 39; 37 and 40; 37 and 41; 37 and 42; 37 and 43; 37 and 44; 37 and 45; 37 and 46; 37 and 47; 37 and 48; 37 and 53; 37 and 54; 37 and 55; 37 and 56; 37 and 57; 37 and 58; 37 and 59; 37 and 60; 37 and 61; 37 and 62; 37 and 63; 37 and 64; 37 and 65; 37 and 66; 37 and 67; 37 and 68; 37 and 69; 38 and 39; 38 and 40; 38 and 41; 38 and 42; 38 and 43; 38 and 44; 38 and 45; 38 and 46; 38 and 47; 38 and 48; 38 and 53; 38 and 54; 38 and 55; 38 and 56; 38 and 57; 38 and 58; 38 and 59; 38 and 60; 38 and 61; 38 and 62; 38 and 63; 38 and 64; 38 and 65; 38 and 66; 38 and 67; 38 and 68; 38 and 69; 39 and 40; 39 and 41; 39 and 42; 39 and 43; 39 and 44; 39 and 45; 39 and 46; 39 and 47; 39 and 48; 39 and 53; 39 and 54; 39 and 55; 39 and 56; 39 and 57; 39 and 58; 39 and 59; 39 and 60; 39 and 61; 39 and 62; 39 and 63; 39 and 64; 39 and 65; 39 and 66; 39 and 67; 39 and 68; 39 and 69; 40 and 41; 40 and 42; 40 and 43; 40 and 44; 40 and 45; 40 and 46; 40 and 47; 40 and 48; 40 and 53; 40 and 54; 40 and 55; 40 and 56; 40 and 57; 40 and 58; 40 and 59; 40 and 60; 40 and 61; 40 and 62; 40 and 63; 40 and 64; 40 and 65; 40 and 66; 40 and 67; 40 and 68; 40 and 69; 41 and 42; 41 and 43; 41 and 44; 41 and 45; 41 and 46; 41 and 47; 41 and 48; 41 and 53; 41 and 54; 41 and 55; 41 and 56; 41 and 57; 41 and 58; 41 and 59; 41 and 60; 41 and 61; 41 and 62; 41 and 63; 41 and 64; 41 and 65; 41 and 66; 41 and 67; 41 and 68; 41 and 69; 42 and 43; 42 and 44; 42 and 45; 42 and 46; 42 and 47; 42 and 48; 42 and 53; 42 and 54; 42 and 55; 42 and 56; 42 and 57; 42 and 58; 42 and 59; 42 and 60; 42 and 61; 42 and 62; 42 and 63; 42 and 64; 42 and 65; 42 and 66; 42 and 67; 42 and 68; 42 and 69; 43 and 44; 43 and 45; 43 and 46; 43 and 47; 43 and 48; 43 and 53; 43 and 54; 43 and 55; 43 and 56; 43 and 57; 43 and 58; 43 and 59; 43 and 60; 43 and 61; 43 and 62; 43 and 63; 43 and 64; 43 and 65; 43 and 66; 43 and 67; 43 and 68; 43 and 69; 44 and 45; 44 and 46; 44 and 47; 44 and 48; 44 and 53; 44 and 54; 44 and 55; 44 and 56; 44 and 57; 44 and 58; 44 and 59; 44 and 60; 44 and 61; 44 and 62; 44 and 63; 44 and 64; 44 and 65; 44 and 66; 44 and 67; 44 and 68; 44 and 69; 45 and 46; 45 and 47; 45 and 48; 45 and 53; 45 and 54; 45 and 55; 45 and 56; 45 and 57; 45 and 58; 45 and 59; 45 and 60; 45 and 61; 45 and 62; 45 and 63; 45 and 64; 45 and 65; 45 and 66; 45 and 67; 45 and 68; 45 and 69; 46 and 47; 46 and 48; 46 and 53; 46 and 54; 46 and 55; 46 and 56; 46 and 57; 46 and 58; 46 and 59; 46 and 60; 46 and 61; 46 and 62; 46 and 63; 46 and 64; 46 and 65; 46 and 66; 46 and 67; 46 and 68; 46 and 69; 47 and 48; 47 and 53; 47 and 54; 47 and 55; 47 and 56; 47 and 57; 47 and 58; 47 and 59; 47 and 60; 47 and 61; 47 and 62; 47 and 63; 47 and 64; 47 and 65; 47 and 66; 47 and 67; 47 and 68; 47 and 69; 48 and 53; 48 and 54; 48 and 55; 48 and 56; 48 and 57; 48 and 58; 48 and 59; 48 and 60; 48 and 61; 48 and 62; 48 and 63; 48 and 64; 48 and 65; 48 and 66; 48 and 67; 48 and 68; 48 and 69; 53 and 54; 53 and 55; 53 and 56; 53 and 57; 53 and 58; 53 and 59; 53 and 60; 53 and 61; 53 and 62; 53 and 63; 53 and 64; 53 and 65; 53 and 66; 53 and 67; 53 and 68; 53 and 69; 54 and 55; 54 and 56; 54 and 57; 54 and 58; 54 and 59; 54 and 60; 54 and 61; 54 and 62; 54 and 63; 54 and 64; 54 and 65; 54 and 66; 54 and 67; 54 and 68; 54 and 69; 55 and 56; 55 and 57; 55 and 58; 55 and 59; 55 and 60; 55 and 61; 55 and 62; 55 and 63; 55 and 64; 55 and 65; 55 and 66; 55 and 67; 55 and 68; 55 and 69; 56 and 57; 56 and 58; 56 and 59; 56 and 60; 56 and 61; 56 and 62; 56 and 63; 56 and 64; 56 and 65; 56 and 66; 56 and 67; 56 and 68; 56 and 69; 57 and 58; 57 and 59; 57 and 60; 57 and 61; 57 and 62; 57 and 63; 57 and 64; 57 and 65; 57 and 66; 57 and 67; 57 and 68; 57 and 69; 58 and 59; 58 and 60; 58 and 61; 58 and 62; 58 and 63; 58 and 64; 58 and 65; 58 and 66; 58 and 67; 58 and 68; 58 and 69; 59 and 60; 59 and 61; 59 and 62; 59 and 63; 59 and 64; 59 and 65; 59 and 66; 59 and 67; 59 and 68; 59 and 69; 60 and 61; 60 and 62; 60 and 63; 60 and 64; 60 and 65; 60 and 66; 60 and 67; 60 and 68; 60 and 69; 61 and 62; 61 and 63; 61 and 64; 61 and 65; 61 and 66; 61 and 67; 61 and 68; 61 and 69; 62 and 63; 62 and 64; 62 and 65; 62 and 66; 62 and 67; 62 and 68; 62 and 69; 63 and 64; 63 and 65; 63 and 66; 63 and 67; 63 and 68; 63 and 69; 64 and 65; 64 and 66; 64 and 67; 64 and 68; 64 and 69; 65 and 66; 65 and 67; 65 and 68; 65 and 69; 66 and 67; 66 and 68; 66 and 69; 67 and 68; 67 and 69; 68 and 69.

13. A composition comprising a first and a second nucleic acid molecule, wherein the first nucleic acid molecule encodes a Staphylococcus lugdunensis (SluCas9) endonuclease and optionally a first or a first and second guide RNA, and the second nucleic acid molecule comprises a first or a first and second guide RNA, wherein the first guide RNA comprises a first sequence and the second guide RNA comprises a second sequence, and wherein the first sequence and the sequence are selected from any one the following pairs of SEQ ID NOs: 243 and 244; 243 and 245; 243 and 246; 243 and 247; 243 and 248; 243 and 249; 243 and 250; 243 and 251; 243 and 252; 243 and 253; 243 and 254; 243 and 255; 243 and 256; 243 and 257; 243 and 258; 243 and 259; 243 and 260; 243 and 261; 243 and 262; 243 and 263; 243 and 264; 243 and 265; 243 and 266; 243 and 267; 243 and 268; 243 and 269; 244 and 245; 244 and 246; 244 and 247; 244 and 248; 244 and 249; 244 and 250; 244 and 251; 244 and 252; 244 and 253; 244 and 254; 244 and 255; 244 and 256; 244 and 257; 244 and 258; 244 and 259; 244 and 260; 244 and 261; 244 and 262; 244 and 263; 244 and 264; 244 and 265; 244 and 266; 244 and 267; 244 and 268; 244 and 269; 245 and 246; 245 and 247; 245 and 248; 245 and 249; 245 and 250; 245 and 251; 245 and 252; 245 and 253; 245 and 254; 245 and 255; 245 and 256; 245 and 257; 245 and 258; 245 and 259; 245 and 260; 245 and 261; 245 and 262; 245 and 263; 245 and 264; 245 and 265; 245 and 266; 245 and 267; 245 and 268; 245 and 269; 246 and 247; 246 and 248; 246 and 249; 246 and 250; 246 and 251; 246 and 252; 246 and 253; 246 and 254; 246 and 255; 246 and 256; 246 and 257; 246 and 258; 246 and 259; 246 and 260; 246 and 261; 246 and 262; 246 and 263; 246 and 264; 246 and 265; 246 and 266; 246 and 267; 246 and 268; 246 and 269; 247 and 248; 247 and 249; 247 and 250; 247 and 251; 247 and 252; 247 and 253; 247 and 254; 247 and 255; 247 and 256; 247 and 257; 247 and 258; 247 and 259; 247 and 260; 247 and 261; 247 and 262; 247 and 263; 247 and 264; 247 and 265; 247 and 266; 247 and 267; 247 and 268; 247 and 269; 248 and 249; 248 and 250; 248 and 251; 248 and 252; 248 and 253; 248 and 254; 248 and 255; 248 and 256; 248 and 257; 248 and 258; 248 and 259; 248 and 260; 248 and 261; 248 and 262; 248 and 263; 248 and 264; 248 and 265; 248 and 266; 248 and 267; 248 and 268; 248 and 269; 249 and 250; 249 and 251; 249 and 252; 249 and 253; 249 and 254; 249 and 255; 249 and 256; 249 and 257; 249 and 258; 249 and 259; 249 and 260; 249 and 261; 249 and 262; 249 and 263; 249 and 264; 249 and 265; 249 and 266; 249 and 267; 249 and 268; 249 and 269; 250 and 251; 250 and 252; 250 and 253; 250 and 254; 250 and 255; 250 and 256; 250 and 257; 250 and 258; 250 and 259; 250 and 260; 250 and 261; 250 and 262; 250 and 263; 250 and 264; 250 and 265; 250 and 266; 250 and 267; 250 and 268; 250 and 269; 251 and 252; 251 and 253; 251 and 254; 251 and 255; 251 and 256; 251 and 257; 251 and 258; 251 and 259; 251 and 260; 251 and 261; 251 and 262; 251 and 263; 251 and 264; 251 and 265; 251 and 266; 251 and 267; 251 and 268; 251 and 269; 252 and 253; 252 and 254; 252 and 255; 252 and 256; 252 and 257; 252 and 258; 252 and 259; 252 and 260; 252 and 261; 252 and 262; 252 and 263; 252 and 264; 252 and 265; 252 and 266; 252 and 267; 252 and 268; 252 and 269; 253 and 254; 253 and 255; 253 and 256; 253 and 257; 253 and 258; 253 and 259; 253 and 260; 253 and 261; 253 and 262; 253 and 263; 253 and 264; 253 and 265; 253 and 266; 253 and 267; 253 and 268; 253 and 269; 254 and 255; 254 and 256; 254 and 257; 254 and 258; 254 and 259; 254 and 260; 254 and 261; 254 and 262; 254 and 263; 254 and 264; 254 and 265; 254 and 266; 254 and 267; 254 and 268; 254 and 269; 255 and 256; 255 and 257; 255 and 258; 255 and 259; 255 and 260; 255 and 261; 255 and 262; 255 and 263; 255 and 264; 255 and 265; 255 and 266; 255 and 267; 255 and 268; 255 and 269; 256 and 257; 256 and 258; 256 and 259; 256 and 260; 256 and 261; 256 and 262; 256 and 263; 256 and 264; 256 and 265; 256 and 266; 256 and 267; 256 and 268; 256 and 269; 257 and 258; 257 and 259; 257 and 260; 257 and 261; 257 and 262; 257 and 263; 257 and 264; 257 and 265; 257 and 266; 257 and 267; 257 and 268; 257 and 269; 258 and 259; 258 and 260; 258 and 261; 258 and 262; 258 and 263; 258 and 264; 258 and 265; 258 and 266; 258 and 267; 258 and 268; 258 and 269; 259 and 260; 259 and 261; 259 and 262; 259 and 263; 259 and 264; 259 and 265; 259 and 266; 259 and 267; 259 and 268; 259 and 269; 260 and 261; 260 and 262; 260 and 263; 260 and 264; 260 and 265; 260 and 266; 260 and 267; 260 and 268; 260 and 269; 261 and 262; 261 and 263; 261 and 264; 261 and 265; 261 and 266; 261 and 267; 261 and 268; 261 and 269; 262 and 263; 262 and 264; 262 and 265; 262 and 266; 262 and 267; 262 and 268; 262 and 269; 263 and 264; 263 and 265; 263 and 266; 263 and 267; 263 and 268; 263 and 269; 264 and 265; 264 and 266; 264 and 267; 264 and 268; 264 and 269; 265 and 266; 265 and 267; 265 and 268; 265 and 269; 266 and 267; 266 and 268; 266 and 269; 267 and 268; 267 and 269; 268 and 269.

14. The composition of any one of the preceding claims, comprising at least two guide RNAs, wherein once expressed in vitro or in vivo in combination with an RNA-guided endonuclease, the at least two guide RNAs excise a portion of an exon, wherein the size of the excised portion of the exon is between 5 and 250 nucleotides in length.

15. The composition of any one of the preceding claims, comprising at least two guide RNAs, wherein once expressed in vitro or in vivo in combination with an RNA-guided endonuclease, the at least two guide RNAs excise a portion of an exon, wherein the size of the excised portion of the exon is between 5 and 250, 5 and 200, 5 and 150, 5 and 100, 5 and 75, 5 and 50, 5 and 25, 5 and 10, 20 and 250, 20 and 200, 20 and 150, 20 and 100, 20 and 75, 20 and 50, 20 and 25, 50 and 250, 50 and 200, 50 and 150, 50 and 100, and 50 and 75 nucleotides.

16. The composition of any one of the preceding claims, comprising at least two guide RNAs, wherein once expressed in vitro or in vivo in combination with an RNA-guided endonuclease, the at least two guide RNAs excise a portion of the exon, wherein the size of the excised portion of the exon is between 8 and 167 nucleotides.

17. The composition of any one of the preceding claims, comprising at least two guide RNAs, wherein once expressed in vitro or in vivo in combination with an RNA-guided endonuclease, the at least two guide RNAs facilitate a 3n+1 edit, wherein “n” is any negative whole number (e.g., any whole number between −10 and −75).

18. The composition of any one of the preceding claims, comprising at least two guide RNAs, wherein once expressed in vitro or in vivo in combination with an RNA-guided endonuclease, the at least two guide RNAs are capable of excising a nucleic acid molecule that is at least 26, 29, 32, 35, 38, 41, 44, 47, 50, 53, 56, 59, 62, 65, 68, 71, 74, 77, 80, 83, 86, 89, 92, 95, 98, 101, 104, 107, 110, 113, 116, 119, 122, 125, 128, 131, 134, 137, 140, 143, 146, 149, 152, 155, 158, 161, 164, 167, 170, 173, 176, 179, 182, 185, 188, 191, 194, 197, 200, 203, 206, 209, 212, 215, or 218 nucleotides in length.

19. The composition of any one of the preceding claims, comprising at least two guide RNAs, wherein one of the guide RNAs comprises the sequence of SEQ ID NO: 269 and another guide RNA comprises the sequence of SEQ ID Nos: 247 or 249.

20. The composition of any one of the preceding claims, comprising at least two guide RNAs, wherein one of the guide RNAs comprises the sequence of SEQ ID NO: 252 and another guide RNA comprises the sequence of SEQ ID Nos: 262, 264, or 254.

21. The composition of any one of the preceding claims, wherein the one or more guide RNAs is an sgRNA.

22. The composition of any one of the preceding claims, wherein the one or more guide RNAs is modified.

23. The composition of any one of the preceding claims, wherein the one or more guide RNAs or nucleic acid molecules is in a vector.

24. The composition of claim 23, wherein the vector is a viral vector.

25. The composition of claim 24, wherein the viral vector is an AAV vector.

26. The composition of claim 25, wherein the AAV vector is an AAV9 vector.

27. The composition of any one of the preceding claims, wherein the promoter for the one or more guide RNAs is hU6c.

28. The composition of any one of the preceding claims, wherein the one or more guide RNAs is a guide RNA for SaCas9, and the one or more guide RNAs comprises a scaffold comprising the sequence of SEQ ID NO: 504.

29. The composition of any one of the preceding claims, wherein the one or more guide RNAs is a guide RNA for SluCas9, and the one or more guide RNAs comprises a scaffold comprising the sequence of SEQ ID NO: 901.

30. The composition of any one of the preceding claims, wherein the Cas9 is a SluCas9 comprising an amino acid sequence that is at least 80%, 85%, 90%, 91%, 92%, 93%, 94%, 95%, 96%, 97%, 98%, 99%, or 100% identical to the sequence of SEQ ID NO: 712.

31. The composition of any one of the preceding claims, wherein the one or more guide RNAs is in an AAV vector, wherein the vector comprises from 5′ to 3′ with respect to the plus strand: the reverse complement of a first guide RNA scaffold sequence, the reverse complement of a nucleic acid molecule encoding a first guide RNA guide sequence, the reverse complement of a promoter for expression of the nucleic acid molecule encoding the first guide RNA, a promoter for expression of a nucleic acid molecule encoding SaCas9 or SluCas9 (e.g., CK8e), a nucleic acid molecule encoding a SaCas9 or SluCas9, a polyadenylation sequence, a promoter for expression of a second sgRNA in the same direction as the promoter for SaCas9 or SluCas9, a second sgRNA guide sequence, and a second sgRNA scaffold sequence.

32. The composition of claim 31, wherein:
iii) the first guide RNA guide sequence comprises the sequence of SEQ ID NO: 269, and the second guide RNA guide sequence comprises the sequence of SEQ ID NO: 247 or 269; or
iv) the first guide RNA guide sequence comprises the sequence of SEQ ID NO: 252, and the second guide RNA guide sequence comprises the sequence of SEQ ID NO: 262, 264, or 254.

33. A method of treating Duchenne Muscular Dystrophy (DMD), the method comprising delivering to a cell the composition of any one of claims 1-32.

34. A method of excising a portion of the DMD gene, the method comprising delivering to a cell the composition of any one of claims 1-32, wherein the size of the excised portion is less than about 250 nucleotides.
